United States Patent Application Publication US 2022/0211063 A1 - sequence listing, part 5

SEQ ID NO: 7 - DNA, 8606051 bp, Penicillium roqueforti (residues 6,884,845-8,606,051 of 8,606,051)
  misc_feature (89140)..(89587): n is a, c, g, or t
  misc_feature (91419)..(91649): n is a, c, g, or t
  misc_feature (329894)..(330030): n is a, c, g, or t
  misc_feature (430781)..(431112): n is a, c, g, or t
  misc_feature (461664)..(461680): n is a, c, g, or t
  misc_feature (496398)..(496577): n is a, c, g, or t
  misc_feature (532001)..(532095): n is a, c, g, or t
  misc_feature (539751)..(539886): n is a, c, g, or t
  misc_feature (569534)..(569738): n is a, c, g, or t
  misc_feature (649051)..(649187): n is a, c, g, or t
  misc_feature (691112)..(691174): n is a, c, g, or t
  misc_feature (866526)..(866690): n is a, c, g, or t
  misc_feature (1032440)..(1091839): n is a, c, g, or t
  misc_feature (1092526)..(1092737): n is a, c, g, or t
  misc_feature (1210194)..(1210406): n is a, c, g, or t
  misc_feature (1240552)..(1246824): n is a, c, g, or t
  misc_feature (1247751)..(1253683): n is a, c, g, or t
  misc_feature (1258302)..(1372301): n is a, c, g, or t
  misc_feature (1374135)..(1374543): n is a, c, g, or t
  misc_feature (1457542)..(1457828): n is a, c, g, or t
  misc_feature (1505355)..(1505527): n is a, c, g, or t
  misc_feature (1513226)..(1513388): n is a, c, g, or t
  misc_feature (1624048)..(1624249): n is a, c, g, or t
  misc_feature (1669160)..(1669365): n is a, c, g, or t
  misc_feature (1761186)..(1761412): n is a, c, g, or t
  misc_feature (1817726)..(1926025): n is a, c, g, or t
  misc_feature (1933126)..(1933376): n is a, c, g, or t
  misc_feature (1963938)..(1964315): n is a, c, g, or t
  misc_feature (2150469)..(2150567): n is a, c, g, or t
  misc_feature (2196699)..(2196907): n is a, c, g, or t
  misc_feature (2250693)..(2250749): n is a, c, g, or t
  misc_feature (2391495)..(2391786): n is a, c, g, or t
  misc_feature (2493532)..(2493763): n is a, c, g, or t
  misc_feature (2532138)..(2532415): n is a, c, g, or t
  misc_feature (2536284)..(2536525): n is a, c, g, or t
  misc_feature (2786532)..(2786788): n is a, c, g, or t
  misc_feature (2859489)..(2859780): n is a, c, g, or t
  misc_feature (2873900)..(2875004): n is a, c, g, or t
  misc_feature (2881521)..(2881826): n is a, c, g, or t
  misc_feature (2897075)..(2897253): n is a, c, g, or t
  misc_feature (3050650)..(3051374): n is a, c, g, or t
  misc_feature (3057165)..(3057416): n is a, c, g, or t
  misc_feature (3069515)..(3069890): n is a, c, g, or t
  misc_feature (3075746)..(3076120): n is a, c, g, or t
  misc_feature (3305143)..(3305240): n is a, c, g, or t
  misc_feature (3318429)..(3318753): n is a, c, g, or t
  misc_feature (3502740)..(3502854): n is a, c, g, or t
  misc_feature (3538027)..(3538610): n is a, c, g, or t
  misc_feature (3783442)..(3783656): n is a, c, g, or t
  misc_feature (3992300)..(3992418): n is a, c, g, or t
  misc_feature (4005200)..(4005463): n is a, c, g, or t
  misc_feature (4027390)..(4027590): n is a, c, g, or t
  misc_feature (4058485)..(4058631): n is a, c, g, or t
  misc_feature (4267325)..(4267362): n is a, c, g, or t
  misc_feature (4352819)..(4353281): n is a, c, g, or t
  misc_feature (4361818)..(4361970): n is a, c, g, or t
  misc_feature (4393748)..(4393981): n is a, c, g, or t
  misc_feature (4451480)..(4451617): n is a, c, g, or t
  misc_feature (4461509)..(4461755): n is a, c, g, or t
  misc_feature (4481215)..(4481333): n is a, c, g, or t
  misc_feature (4533880)..(4534017): n is a, c, g, or t
  misc_feature (4590140)..(4590368): n is a, c, g, or t
  misc_feature (4668962)..(4669294): n is a, c, g, or t
  misc_feature (4737136)..(4737230): n is a, c, g, or t
  misc_feature (4766758)..(4766955): n is a, c, g, or t
  misc_feature (4834538)..(4834845): n is a, c, g, or t
  misc_feature (4927504)..(4928077): n is a, c, g, or t
  misc_feature (4945086)..(4945236): n is a, c, g, or t
  misc_feature (5082742)..(5082890): n is a, c, g, or t
  misc_feature (5112783)..(5113504): n is a, c, g, or t
  misc_feature (5314860)..(5315053): n is a, c, g, or t
  misc_feature (5372796)..(5373223): n is a, c, g, or t
  misc_feature (5459177)..(5459288): n is a, c, g, or t
  misc_feature (5480488)..(5480661): n is a, c, g, or t
  misc_feature (5535630)..(5535644): n is a, c, g, or t
  misc_feature (5567778)..(5567917): n is a, c, g, or t
  misc_feature (5599006)..(5599219): n is a, c, g, or t
  misc_feature (5727051)..(5727129): n is a, c, g, or t
  misc_feature (5743562)..(5744030): n is a, c, g, or t
  misc_feature (5807724)..(5807810): n is a, c, g, or t
  misc_feature (5920056)..(5920734): n is a, c, g, or t
  misc_feature (5922048)..(5922354): n is a, c, g, or t
  misc_feature (5942930)..(5943209): n is a, c, g, or t
  misc_feature (6011395)..(6011690): n is a, c, g, or t
  misc_feature (6325216)..(6325534): n is a, c, g, or t
  misc_feature (6397626)..(6397737): n is a, c, g, or t
  misc_feature (6604883)..(6605053): n is a, c, g, or t
  misc_feature (6843817)..(6849568): n is a, c, g, or t
  misc_feature (6859923)..(6860563): n is a, c, g, or t
  misc_feature (6915280)..(6916067): n is a, c, g, or t
  misc_feature (6919371)..(6924241): n is a, c, g, or t
  misc_feature (6950690)..(6950826): n is a, c, g, or t
  misc_feature (7010241)..(7010478): n is a, c, g, or t
  misc_feature (7088835)..(7089058): n is a, c, g, or t
  misc_feature (7281128)..(7281307): n is a, c, g, or t
  misc_feature (7435487)..(7435612): n is a, c, g, or t
  misc_feature (7580177)..(7580497): n is a, c, g, or t
  misc_feature (7598174)..(7598323): n is a, c, g, or t
  misc_feature (7639388)..(7639504): n is a, c, g, or t
  misc_feature (7648598)..(7648805): n is a, c, g, or t
  misc_feature (8007544)..(8007730): n is a, c, g, or t
  misc_feature (8053265)..(8053730): n is a, c, g, or t
  misc_feature (8129413)..(8129828): n is a, c, g, or t
  misc_feature (8134123)..(8134311): n is a, c, g, or t
  misc_feature (8188405)..(8188554): n is a, c, g, or t
  misc_feature (8240083)..(8240554): n is a, c, g, or t
  misc_feature (8245992)..(8246103): n is a, c, g, or t
  misc_feature (8305274)..(8305864): n is a, c, g, or t
  misc_feature (8314230)..(8318347): n is a, c, g, or t
  misc_feature (8345692)..(8345793): n is a, c, g, or t
  misc_feature (8408069)..(8408275): n is a, c, g, or t
  misc_feature (8424960)..(8425085): n is a, c, g, or t
  misc_feature (8481845)..(8482068): n is a, c, g, or t
  misc_feature (8597364)..(8597610): n is a, c, g, or t
tgactccgcctgatattgcagcagaaacgagaaatttgccatgagccaaataaacgcgttgataacgtatatcaaagctgctcgcccaggatgcctttttttcttcaaatcattggagaatatcgcaaaggcaataatgtttgggcaactgcctggtgacctgatccaggctttgaatgaaaaggaaggtgaccttctcggccggactacactgatgcgagtaaacgagcaggatgagatgagcttgtctattcaaaaggactcagattcttgggaagatgtggagatggagtcactcgcgttgcagaaagctgctttgttttttgaaccttgaaattgttgaaatatgtactgtataggtaatatttctattcatcgcagagcgcttttaggaatacgttgagcttgcgtttcatgaaaatattttaaattcagactttgtatcagactgggtatttttttttctgaaacaaagtagggtttttacttgaagcagtgtggctcatctcatacagacacacacatacacacacacacacacaattcattacgcccggaggtatcaagcctagagggcacctatacgctatttgatctttccattgtatacattttgtcatagcctcattttcgagaggaaaagctgaaccagctgcaaaaaacccctccagcccatacggtatgtcttaacgatttctcttcttgttgttgttgtcatatcatctcctccaaaagcaataacccatccctctgtgacaccggaccccctacgtgtccattctcgatgtagttttcgtgaacctcttccctgagtagcggtttaccgagagtacttctcatattaacgcccgaagtagctgactgcctcgctggcagcaacaccagatagcagacgaaggactgacgaatcgacatgcgatcgaaccggtagggcaggtgagttattgtgagcaaaacccggtgagggtaggttgaaaatgtgtaggcaggtcggttgttcgaaggctcgtcggcattgcgacgttgttgacgtgtccttttgaaggcttcccgccgcgtcgtcacaaccaataaaggagtttccaccggagtttcgatttgaaaagttctcagtttcggtcagacattgcagtccaacttactgacatccctccccacggagaaggtgactttccatgagggactcatctcatacagtaaaattcgaaatcagctttaccaccgaactttttcactctctttcccagcgccccacccagattgcgctaaactgtatttggccacggaaggtcccccagactaatggcatatgtaccttttgccgatcgtgaaaaataccgtaagcccgattactggtaccagacaccctgcgttcccaatatttctctcccgggcctgagtggcttttcgattgctctaggcttctaatatcaaacttttgaggcttattttccagtgcaatgattcactacttcgcgatgctaattctgtgatgtatcccaagcagatagctcccttacatattcactgtggttgagccatttgtgagccctggaccctggtcaagcttttactcaggttagacatcttttcattttatcacctaacacacaagaggtcttgatgatggcctagcattgtcattattagactaatggtgtgtgttggacaagtctatgacaaaaattgccacccaactcaaaatgtaaagacccgactcttgtgtgtatttctcggcaataaataccatgacattgctgctgatcggcagcttgctgagcggagcagatctatcataaattcttatttccgtagtaaagttcttccgcccggctggcaacaattcagctgtctctttcaaacccctaggaggtctgcctttgcatccatcatgagagttcaggcgaagtcctctttgtccttcatctttgcgactagagctcactttacttgaaactacgtttctggaaaatatgtcatcaaaacttccatcaacgtgtatgtgctgtgtaaactgatcaccacccccttgaacctccagcgcagcgaattaataaagccagcaaacgtggcaagccaggctccacaggattacgctcctgctcagcattttgccctcatctatatggatcaatatgggacacttcactatgaggcgtccccttcaatcgtccattatcgcgacactatcctttcccctcaagtcaccgcggaattcctgaaagcggtggcgaactccactgaagttggcctgcgaaggtcctccctggaattcgcttccacccagctatttcctgatcacctcgggaactatgactctcacgattctcggtttccgaaaggaatacaggccgagggacacgatgtgcctacaacatatggatatcattcacagcctcacctatggccaggccatgatatagctacccccgccatcttgaaagataaagtgcttcacaagaagagatcttgtttgcagaagcacggcctggagctccaagaagcaatgttatccatcaaagatacgaaatttctccgccgatactacgaaaaggtcttccacaatatacagcaaaccaattgccgagtcctggcaaaagcctatgtgaaatgtgttgagccccacaagcaagtcaattacccttataatgggcggaagaccgtggcgggggaaatacgacaattaagttccgagcagagtaagccaccatggtggcctcctcaagtgcgccatcgggaacccgatcatctactcaaagcaggtaacaagacactttactgcgcatgatacccactaagctcatcatctcactagaacgcatcgcgcttcttctccatattctttgtgatttgcgctgcagtcacggcgtcacatcacaaaaactgaaagatgcagagcaatctgttcggtcgcatattatcccggttgaacgtttagaactcctagatgagttgtatcgtgttagaggagaagaggaaaagcttttgatggggcttcttggtaagggcttgcaaccacccattcttcacaagctaatgaagtacatctagaaaaagacgcagctgttcttatctcgcggatcaatttacccgcttccaataaaatacccagcaagcaaacccagccggacagttgggtctctctgaagtacaaagagggtgcagcaacatacgaatcgtcctctcacaaacaagatttgtacaatgtgcctatatacccgcagcgtaacttcacaggatacaccactcgccaagaagacatgatggattcttttccggtcccggcaatgtcatccactccacttggaaaaaagcgcccgatgatcgacgagacatatccttctacggcaattttcagtcccacacatttggtatcctcgcagtgtgtcaccagccattctttgtttgtgaatcttccagtaatggaggatgtggggcctaggctacaaaatggtcccggattggttcatgctgaaatggcactatttgcagatcgcactcaaatttgcacaatttagagatatttaccatcacttactctcactgactctagcctgtcttgtttactctagtcgccaaaaaagataaacaagacattttccccctggaatagggtctggttggcacgccatatagcaaaggtataagcttttcacctacatgcatccattaacatatttttttcaccaatgccaatcaggtttaggctgagagagttcttgaaagcgtggtctctaagtgaaagcctgtcacaactcagcttttccatgtgtatcttccaggtcacggggcataagagtcaacgagatagacacttttgaaaaaaacactctatgagattgtagagagatcctcagtcaagaaatatgctaccgcatactgtgatagatcgtctatgcattgtgattgagctaacttgcggcgtaaaaactatccagtgctgcacgagcagaagtcacacttgctttgagactagtgagcgcgcaatatgtatgaaggaaagcagcttcttctttacaatgccccgctctatctccgtcgtccatctttgtgctcgctattcgaatgttttcacagctctcattgatcctgtacatccctaacatctttgatttgcgtcgaagatcgtcacagaatgatcgcaacagaagtgtgtcatcatttaagctgatagatgttagcatgctgcaaatttaacgtaagtttgaaggcttacaaggctttctccatttcctgagtcgcagttattgccactgcaatatgtgcatatagtgttgtagagctggttaaacgattttcctcatgatccatctctagcagttgcgagaaaattgccgcgtcaaaattccgcttaaggttgctttcgaattgctcatttgtcatattttaaaatgtaatcaaagaagacctgcatgctgtagtagtcgcgctaactgaaaaataaacgcctggtgggaattcttatatgcagtgagaaatgagtttgtatttgccgctgaagaggcccagagcaatcgaaaagccaccccaggcggcccggatgattgggaacacggggtgtctggtaccagtaatcgggcttacggtatttttcacgatcggcaaaaggtacatatgctgtcggaacgtggtcgttacagtacggactagtacgggcatagccaattgagtacttgagagtgtgttttctatatactatagaaagtgcagaataaataggggatgagcttagtaaggtcgttgagagccttacgatcgtcaggcagagggggtgctgaatattcctcgggcgcactagtaaaatggcgaccctcttttgttgacatatgccattagtcagggaggccttccgtggccaaatacagtttagcgcaatctgggtggggcgctgggaaagagagtgaaagagtttggtggtcaaactgattgaatttttctgtcgatgattctcagtgagccttacccaagttcgagacctattctctcccatcaatcaagccgccagggccaaaatttcaatgcaaaattaagagtagattattctgtggtcctgcaagacacgttacatataaatgccaattacctgtcaatcaaaactgttaatttgatttatgcaagaatgagagattgatgcatttaaccatcatcaaatgaggacctatattaataccattccaaaccttactctttgtaagaataaaaagtacatgcagagacgatggcaagtcgcgctagcccaactaagctgccggtggaacaagttgctgcaacaagcggatgctaaagactgtcaatgtttgatttaatcagaaaatattgcttcagcttacctgtgtcagttccattacagacctagctgacgttgtcgatgatagaaaatcaacggcattcgaatcgatgggccaccgagctggatcgtctatccccacattctctttgacatatttctgcatcagctccattgtcagagatcccaagcctttcaaggacaaagactgagattgttccggcgtgtagggcacagtgagttctaaactagctatcacgacaatcagtctttcaccggcgattttgaagtgctaagtacaataccaattttcaccactccgtctaaactcattagagtagtggagcactttaaagacgaatgttcatagccgcattcaatcagataagacaatccgtccatgacctttttcatatgagcaaagtcgtctttggaaaacggcggtaacaagaacttacttgtttgacaatggaagccagctggacctcactgggataggcatcgctggcgaccaggtgctctaaactgatcggtaggtcatcaacaatgaagtggttcactccattgtccttgaaacattcactggcagaaattatgttgaagtggtcgaagcgcgtatatttgtggagtgactcctctccatcggttcttgacgagcttcgtatggctactactttagaaccccggcgacgatgttcgcaaatcgatactgtaccggcaagatcgcatgtaaatatgggcttataagtctcccacggggaacaagttcgtataagtggagtctgcgccaaccctccagtatcgacaatggtggggagctccagtgtttttggcgaacctctcagaatcttgcgagagcgatcttgctgagccgcagggcccttttggtatttgatagagctttgggtatggcctggctgatcagtgaaattgtgaggctgcgtttctgctgccgtgaccgacgaagagaaatgcgcctgagcttgcaacatgtcaaaccgagtagcccgtttgtcttggtctcttttcatgtttgaatatagactctagaagactttcagaggaaaagaaaccaggtaccatggggacagcggtagcagtgtttttgtagggcacattcgagctgccatccacagcgagactatccgcagcgagccttgccatctgccaatggccattcaacgacctaagagcttaaatgcgctctgatggccgcttctcaaaccacattttgaggaaatcttatttggggattccgagatggaacaatctatgttcacagatgcggaagcacaactgacaactgagcggcgcctgaagtaccaaggaactgccaagatagatctgagccagattacatgtcacccatgcgtggctcgacaactggaccaaaagaatgttgagagactatgcgaggtatttcggaaggatggctgtaatcgacttgatgtgcaacatcatgttacagctgttgtaacccgccgacacttgaagcacgcccggcgggaggcacagataaccgcggaggaattgctgactaatcgacctgataaatacccgttcctttctttcccctccagccaaatccagtgtctacatggtcaacaccgcctgcatgctgcaacagaagtccttgctcctagtgagcgatggtggacggtggacctctatctagatggtgagtttcgttttattggctcaacttctattttacagccttcatttttaattgcctcgttcggtctgacatttatgtagacattagccatgaattacgaaataccctagtcgatgaatatgcaaacgagaagacacccactgatggagacatataccgcaaaatccgacaataccaaagcgagcataatgcagcgttccagaagcggtggtggacgcgtctttcggaaaataaagctaagcgtttgcgacaactgatgtctcctgacaacgtcgacatttgtgccgcctttgatgccctacttcccattccaggtctgtggaatggcctgagtatcggctctctcaatcgtgtactagcattgaagtgcgatgaagttagttatcatcgctttccccggcttccactcatttttcgctaatgacgaaggaaattatccactatttacaacatgtggaaagattctggtcgactctaatggatggcgatcgacatcagatggccaaaatcgacattcataccgtggaaaagcttcaactgagagccccagcggcatgttctgcggatgcgagagaagtcaaaggctatatactcggcggtgaggtcttctcccagtttgaggagactgaacaacctagaatatgggatcgaatgtccagttatgacgggatcattccttcaattcacacctttttccgcgatactacttatctcgaggcgtgcgcaaccggcgtgcggcagtttgctgttctgagcaagagccagccaacagtgcgagccgccttgaagcatgcctataagcctgacacgaccaggggggcatgtctcgtgcagacatcagatgcgagctttcggaatcacacaggcccaagcacggattcttttgaactcgcctatcgacaaatctggttatttgctatgcgccattacccggaaatggccaaagatgctaccagcaagaaagttgtcgccaagaccatccgcggaagagcggacgaagtagtgctccacaatatggctacactcgcacagaaattgggatttgactctttgccggtcactgaaatgttgaaccgttctcccgaccgaagaattgctcgcgaagctctactcaaggcccgaaaaccgggtagctaccgatatgaccccgccacattcgattcactcattgaccgattagtggagtgttttggtaccgcggtcgctcacgaggctttaccatcgccagatttcgttcttgaaaggacaccaacgctttcacgtcgttgtggtcccccactcgagcatgtgcagccgatagatcgacctcaccttttcctaggcaaagtgcattccaaagaagcgacagggccgcagactatctcctccttttttgtgagacaatgcgtgtattttgctttctttgacaagcctttgacatggacacaaagtcaagaccatgatcaagcttcgcctgagctgctgcaaacggacgtttctagatcccctctgttcgtaccagttgatgacttgccaagtaacccacgagtggtcccagctacgggatcagcttcacaaagacaatcacgccgagagcaacgccaagaacgacgccgtcgaagacaggcaactggaaaccggtcacaccgagaccggcgacaggaaattgttgaagaaatacatcctgccgttccggccgatccagtcgactccatcactgctgatgatgatatgggtatgaatgacgtcgcccatgttgttgctggtggtgcagacatttccatggcaggatcttccagtgagagtcccatcggcgggagtgatcatttagcgatacagaacgagttattccgcgacaccagaagagatgttgaggagaacccagagcttttgccaaatgtcgagcaagacgagcaagcgcttgctcaagtcagtgacacaaggcgcaacttgggagacattgtacacgaaccatcaactgacagtccaaatggccatgatactgcagagcgacaatcggaagtgaacgaggataccgcctcgcaatattctcaggactcttcacgaagcggcgagaacgactcaatggaatatgtggagtccgtcgtgcctgctgagatgcaagaccggttgacaagaggagtgtcttctgatgcagatctacaactcacgtcgtgccctgttgaggcggatagcgaaagcctgaatcaacggaccgaggaaagagaggttgcgcaagatgcagtacaacaagcccttcggatgcttgagcaggaagcagagacacgggcacatactagtatagaacggtcagaagagcaatttgccacgtcgaccgatgagccaactgcttcattagagcttcccagcccaggtgtgggaccggctgtgaacgcattggctgaatctcgcatatcgaatgaacattcgccagccacaactcagaatcctgacccgattgttcggcaaggtcgagtgccacgaaacgcccgagcagcaaagaccatcactcaaattgatttgactgggctggatgcagcaattattgtgggagaggatggacccgaccagcaagagcaggctgagtcaccaatcatcggtcgggctgcgatttcaacccctcttggtcaccaggaattgtcggagcatgagcagggcacagacaatatgggacctcgagagtttctgagcgatttgcctgatccttcggcctcaaatccgatcataggtgaatctactggcccgcctcgacccgcagcgcttcagatctcagcaggggccacgggagagggcgggcccagccaacgagaacaggcagatgtccaaataacccatcatgatatggcatcaccagtctctaagcctccggaacccaaagagcatgttcgacagacgaacaaaaagaagctacgcgaaaataaggatgactcgcaagaggctcccgcctcaggccaaaacataagtgagttcacagttccacctctgccggaagcgcttcgcccacgtcggaaccctccacccaacgcaatcacgattactttcaaaatttatgagaatggaggatggcatgtgacggaccaagtgccggtcagcccgaaggacccatcggaagcacatcgtatagcccacaagtatgcccgcaaggacaacaaacatgcgcgcttctacaacaagaacttacgactagtcagcgctgctcaatgtgtccgggccgcgatggatgatggatcgaataccgtcctcatgagcctacaacaggatctcgtagtgacacgagccaaagtggctgcggtggccgagatgatggaagcggacgctcagagaagggcagcaactgatgctgatgatataataatgtagtcaggtttcgaactagtcttgagtcaccaggcgtcttaagctctgagacttatggcttagcaggtcgtgaaattgtaggggatataagttggcattctaatggcctggtaggtcttgagaccgcggtcttgggacctgctgggtctctggctctgtgtctaccgccctcgggtcagtgtcaccgagccctagttcgtagtcttatatgagcagatttcagttttaggttacatgtcatcagctttcaaatatgtttcttataattgcccgggatttaagcctatagtcccatcgccttggtggccttctgttaatggacacgtgctgaacttgggcttcgatcctctcgggctataggagtacttctgcagaaccttcatagtcccaggacccctagccacgcagttaccattcttttacggacctagatgctcgtcctatatgtgaacttattttcttgcacttggtggaccccaatgagcattaaaatcatatacgaaccaaagacaaagatcataggaatcactgtcgtgtcgccataaccagagactccgtcacagttgagtgaaaatcaccagggatatgcctgtcaccaactgcatccctcacgtcgagcacatcatatccaagctcagcagccgctcgggtagtggtggagacacacatgcgccatatagccaaccaacacgactttctttcctacatcgcctagaccttgcagataggcatgcagatcggtctttgcagacgcactaggaaagtctttggtgatttacacaatgtaacactcctgtttcttcacattcgtgaagactttgccactctagcatgaaagaaaatagtaagggaatatgttcgattgttgcccttatggcctgtgatctgtggcttaaaagccgcatcttgtaagatagtttctgctatatccaatcaaagccaactcgtgcgtcatgtagaagagcagatgcttgagatatccagtttttcgcatctccattatcccgtccgactgcggatgaatcagacttgtttaacacctcggactcaccgcccaatggagcattccacagctcatcactgtctggcatgcaaaaggacaagtcggccagggtcaaaagattggttgtgccactattggaacattctccgctcaagtcaaaggaagcgggagtggacaatcggcacaccttatagagggctagtccaaatctcttgatctcttcaacgctcacatatacaagcgcgagtggtgcatcggcatcgtgttgcagaagcatgttgggatagtagaaaataccccaccgtcgacagctttgaacaagcgcagccaagaggtcgtatttgtcgtctggtaatcggcatcgcatgctcaaatctgtactagcattctctcttgcaatgaaaagagaaaggatgatattcaagagcacactttgaaatgatgttatgggccacgtggtatttgtgtgttggcgtggactcgagttggagatgcaccattggtcctagagcacaagaatgagattaacacacaattctatatacagttaatattataatgcttcttcttctcaccatttgagcgttaaatgcggaacatagtctattatgtagacgtattgatgcgtctcgtgcctcctgagtccctttaacccaaagtccgattgcgacaacggattgaacaagtacacaaggttccttagcaaagtcaaatgtacttcgatggagaaacggccaccttgagtggaaagtatcaaagtaaatatcaatatagtcatgagcaatccaccggggagcgtcagaaacggaatcattaatcgtggaaacaggcggcaaagggcaaagatcatcgatcgaaaattgttgttcgcctacggtttcacccccactaggcacacagaagacgccgcgatgttgacaggcattgcatggtaatatgccatcacaacgtactttccgcacatgacatgcaatacatgccctaaatttccgagacggcggcggttctctctgcggatggtaagtccggatatggcgtcgcaataggtcactgattactctctgagttgaaagtcttcccacgggatcggagaaactactcacttcctggtcaggacgctctcacaataaggacagggaagattgatttccttatcatgatgattacgatgtcgattcaggtgctctttacgccgatatttggcgttgcaatctggaaagtcacattggaaccacaaggggacagtatcggcatgaggcggcattgtgcagaatttttgcaaacctctggattccacaacattgtgaaatggcaaaaatggaggcaaaaagggagaagagaaggtaatgactggagctccggtggggccccgaggaaagtcaccaatgaagttacaccggtcatcccgcttgatgagtaactccacaggtggcgctaactatatacatatccgtggataaaccggcaagtgggataggccgaccatccaagtgtatatctataaatggcaaaccttcgaaatggtgttactccttttactgcctccactatcttggaaagatctcttggcagttcagtggatctcaattggagtgcaccacaatgcccaacctctatcaccctgaaacattgcgcaacgactctgaacaaaccgacagcgtcgatgtctgcaccgaaacctacttcgcctcacatcttgagccagcaatttccaaactggccagcatacatgcacctccggaattcgaagtttactgggactctgacgaccccgaaaatccccacatgtggccgctttggtacaaaggcctcactgtcgctgctatgagtcttggtgctacagttgtcagtctctccagcacactgtatacatctggaattccaggactacaagatgattttcatgtttcgaagatcgtggctctccttggtgtcacgacttaccttcttggaatggggataggcagcatcatttttgctccactcagcgagcttgtgggacggcggccaatctatattgtctcaatgataatatttttgtttttattgttaccgagtgctttagctcaaagcattgcttcaatcctcgtgagcagattctttggaggattctttggaagtgcattgatgtcgaactcgcccgcatctgtgaatgatatcgtctcggataagcaccgtgctttagcattcggcttctggtctattggccccaccaacggccctgtttatggcccaatcataggaggatttgtgttccaatatcttggctggaggtggacaaattggattgtcctcatcattgggggtgtggtcctggtcctgatatcctctgtcaaagaaacttacgcccccgtgatcttgaaaaagcgcgccgcgattaaaagaaaggagacacaggacccaaaatggtggacacgctatgacgatggtgtcggctttacatcctcactgatgatcaatctcaagagacctttcgtgatgctcctaacagagccgatatggtaaactatctccctcccatgctacaaagccaatgttaacattctcgtagtatattttgggatggctacgttgcgattgtttatggcatcctttacctatgtttcgtcgcgtatccaatcgctttccaacaagaacgtgggtggtcgccaggcatcggtggtctttcattcgtcggtataggcgtgggtgtcttgatcgccattgcatgcgaacccttgtttcgtaaagtgatcaatcttcatcgcaaggatccagaaaccggcatggtacaaccagaggctatggtcagtgtcgtcttttttggtgctactcttttagccattggccagttgtggttttcctggacttgtactccaaacgttcactggatcatccccatcctagccggtgttccctttggaattggtaatgcatgcgtcttcatttacgcctcaaactacattgcccggtcttatggcatttacgccgcatctgcgcttgcaggaaatatgctcactcgcagtgtcatgggagcattcctcccacttgcggggccatcaatgtataagactctgggcttgaattgggcaagtacaatcctgggaatcgttgagacagtatgcatcttgattcctgtcgttttctacttttacggacacagaattcgaaaggccagtcgctttatcaaagaggtagaaaagctgcaggcagcttgaaaaaacttattagcaaaatgttatatgtgctttatatttgttcgaagtgaaaattgatgtctacgataagtcattttataacaacgttccaaaattcatctatctcctaaacggtggaccgtgacaatcctttaagatacggtgtcttgactaaggaccaagctacagttgggtataaagccaagagaggttacctttttcttttcgtggtttcaacgggatttccagaataaaatacatttagtcggagtaagccttcgagcgcagcagatagcagttgtgttgttgtgaaggtcatatactcagcaaacattccaacccaaaacgtaaattacacactttacggaatatttgtcgttgttccatctagtgattttgaattatccccaccatattaaaccgtaaacagtcagattctccgccaagccttttgtgtgcaaccttgaaagtggctacgaagtggcaattgcttactccgtaaagagtagagaagaattactcaaattgattcacaaccactgtgctgaataaacccgtggacatcccgcagagatattataaatttctctccattttcgtggcaaaatggaactttatctctacgggcgggatgagccgaacttacatcatcagtaggatgaaacagaatttctaatattttcagaaaagcaaagtatttaaacctcggtttcccatgaacagagggtctccatatttcattccattgaatcacatccacagtatcaaaagttcacatccccgactttcgctcttaccgcagccatggcagcaacatccaaaccaacccttacaatcacacacatcaccacagcaactgccattctcaacattgatggagtcaactttctgacagatcccttcttcggagccatcgaagggacagagtatgattcgaccgcggtctgggagcaaatggacctgaaaccgtacggtctcgacagcatccccccaccaccgcaccttgtcaacaagcaaggaccagcgcttcagctcaatgaactgccgcctatcgatgctgtccttcttagccatgaggatcaccttgacaatttggacccagaaggccgtaagctgctggatggtcgaaaggtgtttaccaccgtggacggtgcctccaacctgcgcccacgcccaggagtcattggccttcgcccctgggagactgtgacttcttgtatcggagggaaaacgtaccgaatcactggtaccccttgcaagcacttcccagttggagaagttacgggcttcgtcctagagaccgattccttcggtattgatccatctggcaagcctaatgcaatctacttctctggagataccgtctatattgatgaactgcaagagattggaaagagatggcacattactgcatgcattttcaacttgggcaatgccacctttgaattcccaagtggccctattcagattacaatggacggtaaacaagctgttcggcttgcccgtgatattggcgccgatgtcatggtcccaattcatttcgaatcgtgggatcactttaaggagggcggagcagagttgctggaggttttcacccaagagggatttttagacaaggtgtgctggacagttcctggcgttcccaaggttgttttttgattgtgaatcaatctatcaatattgcggccctatggccctctttctgcttttatgcttttcttttcttttcttttctttttaccgtaagttgatttagacaaatttctcagacccaaagctaagatattttccaaaaaggaacatatcacgaaacagaaaaatagtccctcggtagaaatagaaaatctctttctattctcaccatttgatcttcaatgccatacaaagcagggccttattcaatggctgaaatgccgcgccactcctcgtttaatttttatcctttgtttgaggttttgaaatgtaacatgacgaagtccaaatgacccagggccctatacattctctgcagtgaagaatgttgtcggggctgaatgaaacctcacgtttcacatgggagtttcgccaacagatatgtcaaagtcatatagatgcggtaaactatccattgcggacagaatctctctccatgttccagtctcgagcttcacgtgccttaactcgatgtacttcatcgattcactgcattgctctataatattgacgagattttgagatgaaattttcacttcgcgcagagacaaaaactgcaggcgaacagttgagccgagcttcagacgatcaatacttagatagttcgtgctgctgagcgagagtgaagtcaggcttgtcgaaagctccgcgatgctcaacaagtgggccgcacaggattgctggtttgtttgtgcatagacttgcaatctaagatggtgaaggcgactgagagtctgttcaatcggtatccgcaatgtgctgatattctcggcaaacaatggagcaagatcattcgtcatcggtaactgaagttcaagttctgtcaagttgggcagaggcacgtagcataacgacatgagcatcgagtcgatcgatgctttcatcttgtcatggggcaataatgtcaatgaaggaccacggaagtcgagagctttgagattgggaaattgacgcaagcataaagacagcaagccggcaaggtcttccgtgtatgatgtaacctcccttatcgagcatgggaaggaaccatatccaatatcgacttgacgcacatagtgggcataggggctgttagaaaggctcaccagctttcctaaggatggaaagtgcctggtgtggtacaatgaaccggctagggctataatgtggcggaaaagacgggctgaggcactatgacacaagcttttgttgaccaagcggagttttgcgagattcctccgattataattgttcattattcgaaattctcgaggagccgacgtctttgaagaagattgcgaagtgccgatctcgacataaaatgtaatctgccaaaagaattgttcagtagtggcgcagggtgtggactggtacaaatcatacaaggtcaattatctctgctggaaggtacatatcgatcaacgtttaagcatctttggcaggaaatcaccctgctaaaatattgactggcttcaagtgttgcgtgagcccctgcggtcttaccacccggtcccaaatttggaagagaacaggagcccacgtaagagaaagagattggcaatcgtcttcaattataccagcctattttatcttcggcgaaacacaaaaccaattttccgttgcaatgtaagaattttaacttgatcttggagtcaaaaacaaagcatcagacatgttctacccatggacatttaattgcattcccaaaatctagtcttggcgggaaaactagccattttgagacggttgaacgccacagtgggtccgtaacgtaaacattctgtactgtgtttgaccttcacaacactaccagtcgtcctctcaagcttgctctaatatgaggagaccctgtctgctgcatcgatgacgaaaaaatataaccatttctagcttttatacccgtgtcttagtctctagccaatacatttcctcttaagcgtgccctatgtacctaactaaatggtgtttgttctgttattgtaggttgaagaaagttcatgaaaacgcacggaaaacatagaaaaataccgggtatctcggagtatctctacttgattgctaattgatcatcgctgccctggggatatgtaaccatggatcctgctggtcggtatcccgcccgttctcggaccgaagagatgcacgtgcaccctggctgttctctttgcaactacttgggcggggatggtgatttcagatgtggctgataaatcattccccaatgtccttggatatataacttaacccaactcccgaataactgcattaatctggtaaaccttgagttatgacgaaatccgctaacttcggtacttccaatatgcggtgagtctcttcatgaaatcgataacattagttgtgctctaacgcccaattagaaatcaatccaatcatcccgccaatgctgaggaagaggcatattacgaccttggttcgtatcgtcgatcagtgaccacttcgtctgcggaaacccaattgtggttcaatcgcggattgaaatgggctcattctttcaaccatggcgaagcggtccgatgcttcgaacgagctgctgaaagcgattccaattgcgctatagcgctctggggaattgcgtatgcgactgggcccaactacaacaaggcgtggagatactttgacccagaggatcgtcaggcttctatcaagaaggtcaaggatatcctcacccgagcgtccaagctagcgagccaggccacaccagtcgaacaagcgttgatcggggcaatcggcgctcgtttcccaccaattgatgacatccccgaggaactgggccctttcgaccgcgcgtatgcggacgcgatgcgctctgtgtatcataagttcagagatgatgtggacgtggctgcgctatttgcggaatcgcttatgtgtatcactccgcgcgggctatgggacttgaacactggtaaaccaaccggggatcacaccattgaggctcgcgaagtgattgagctgcaactgcaaactaccggtcgcagccatccagcaatctgtcacttgcacatacacatgatggagatgtcgccatttccagaattggctcttccggctgcggatcgactacgtggcatggttccgcacgcttcgcatatgttacacatgccgacgcatattgatgccgccgtcggtgactatcgccggggtattgattccaaccatgaagcgatccttgccgacgacatctactttgcccgagagacgggtacaactatgtatgcggcgtaccgggtgcattacgtttgtgcaaaattgtattccgctatgatgtctggccgattcacggacgcgatgtccgctgcagaaaagcttgaacagatcaatgatccgaacctgctatccgtcaaaagtcccccaatggcagacttcatcgagagcttcgtgggaagtaaggcacacgtgctagtgcgctttggtcgctgggaagagattcttgacctcaagcttcctgccgatcgcgatacatattgcgtaactacagccaccatccattacactcgcgggcttgcattcagtgcacttggacggattgcagaagccgaagccgctcaaaaggagtttgaaatggcgcgtagggccgttcctagctcccgactcaacagcattccgtgcaaggaggaagatgttctcgcagttggatctgctatgcttgctggtgaattagaatatcggaagggaaatattgagacggcgttccattcccttcgggaagccattgtgcacgaggatgcactcgcgtacactgacccgcctgcctggatgcagccagtccgccatgcgctcggtggcctgctccttgagcaggggcgtatcgaagaagcagaaactctgttcaaggaagaccttggcttcgctcttgactatcctcggcgtaaggcaaaactcaataatgtttggggattgcatggcttatacgaatgcttcagtcgccttggaaagattcaagaggctgctttcattcaacctgcacgggatattgccttggcatctgctgacattccagtcaatgtttcatgcttctgtcgaacttcttcggtagcaaaggatggatgttgttcatgattgatcattgttgggtggcctgggggattaagcacgcacagtaaccgcacctgctgtttgctataaccatggagagctataaatagctttctttatttctccctcccgtccatcccgtttgataggaataagcatacagtttaagcatacattttctccgtacagatatccgtgtatgctgatttctagaactatcattttgctggggggtcacaatccggaaggcttcaagctgcacccgaaatatgttgatctcatccgtcgacacatcagtgctgggaagttgctttttacgacttacactggctcagccgtatttgcgtctacggggctattagatggaaagaatgcaacgatcaatcacgcggtgtataaatgggcgaaagagaattatcctgctgtcaactggactaagggggaaacatgggtcgtcgacgaaaatatctggactggagctggtgctgttgcgggtatcgatatggttgcaagttggctcaaggagcccttcggactggatattcttacatacgctgcccgcaatctggactacgagcctcgaggtatcgatggtgtctcgcttgtgattccgaggagatacgacgaaagcgggaagcaaatcagcacccatgaacttttctatcattagcctttggattttaaagatgtgaatttagggctccactggcggtacaccagttgagaaatccaaatgttgtcattcttattgggtattgtaccctaaagcccgtaggtatatatcaattccaagatccttgctagagcaatgcgctttccctacatactcaattcctcgctttcaataattggctacacaaggctactgttcgttccgtgaaaagatttcatatatgtcaggaattcgacgtgaactcaagatttagatataacctaccagctcaaattacctgatttagacaaagcaaacaaaataagtcatttattgttgattgaagggaactggacccgtcacagtcgagtggaaatcaattgcatggcgttggaagtgcattactttatcaaaatctcgatcgcatatattgcatgcgattttggtgttagctgcaaggttttgaagatgctttcgcttgatatgctttgaaacatcaccatgcgatgcaaattgctgcaaacgcttcttcatatctaaatctttttgtcctagacaaataaagcaaaaaagcggccgatgatcgttcgtgatagatcggaaagcagcctcaagaggagaatctgatttagacttgctttgggtcgcttcgtcatctgaggggtgattgccaagacaatcaagctcgaccacgttattctcaaaacgtttgttgcgcggcagacggcatgtttccccttcctcgaattgacagtaaaaagcgacagcatcgatggcttcagtccgccgacgcatctcctgatccaaagttggcggtggcagactcaacaggcattcgatcagacgcttttgaggtggaggaagctcctccgatctttgcaagttggttttgaccgctttttcaagcgtagcctcagacagctgtcgttgaacttccagcataggttgctcttggtcatatttctcctgaatctgtgataacaacgcatttctggcccgttctctcgcgccgttgatttcttgattcagctttttataagcgtcgtatttaacagtgcctcgatgccgcgagaggggtcggcctagtttttgacgaagctcgtcacgacgctggaccaatgatagaatttctggcctttggttgacagaggatgattgcacagttgtcaggtcttgcggccggtttgggtcgatggtcctgctcatccggcaggctgcgtgcatgatatcctcgtctggattaagaccgcgaattaaggcaggtaggtttttatcaatccttctatcaaggtagtactttagaaaggtgcgagtatcggcatggtgcataatcaaattacgaagagagtcgctcacggaacctaaattaaaagaagccatgattagcaagttgtgaatgcgcacgatatataaatatgcaaggtgagttaccgctattatccaacgctttggcagcgccatatcgcaagctgtaggggcgagcaacttgtcgaaatccagtgatgactccaattgttttgacccacggaagcagtgtagagtatggtagaggcttgtcgggggagatgctcattccttgcaatgaccgttctgtttgtcggaatactggaacatcgtctaaagccggatcgagcagtaatggaagttcattacaatcttctggaatatttagacgaggaagctgatctgcagagaacaaaacctcctgtccctcgacccgtttgaaagcacgatccccaaagagcaagcccagcaaagagacatgtggactgagaacaagcgatgggtcaaaaatgatctcaggaaggatataagtgttcctgcatgctggttaactatctgaagaccatagtaagtccttgatatatccactcactcgtctttcgtgccaaggaacccttttgtgaactcgaaggtgaactcaatcacgattctatgtgggccaccttgcggatctcgaagcaaactgattcgaatatgacggtacatcaaattcaatatggcttgaggacgattggcagtgaggccagcaagttgcaagaagaggcagagctcgatacgatgcctcccatgtccaaatttcttttttgtagtactgatcgcggtctcgacgaccattgtcaagtcctccacgtacatggtggacttttcacggcccttacgagataacttatgatttcgggataattttcggatgacctagaagagtggttaatgccaactatacggtgcggacttaaagtatatggtggacttttcacggcccttgcaggataacttatgatttcgggataaccttcggatgacctagaagattggttagtaccaattatacggtttaaagcgtctttggaaggacaacggtgccgtgattcggcaaaggggggattcttacccggcgcatctgtcgattcatgcgattttcaatcttgccagatgtggctctttcaaaaacaagtcgaaaaaccttccagaaagtttccagcgagctcttccgcttgattccgggtagtcgtcttccatttttccctcgtcgcagattcaaagcccaatccagaaaggtatacaagataccaacggataacttcaagaattcttgctgaggatcttttcgaatacatgcacagaacctgagacggctcttagttagtcatagtgtgtagaaatactaggagtgaaagactaggagtgctcggattcctaacgaagaagtgtaacgcactgattccatctcgtttcaacttggtcaaggagagacacagtgcctttgctgtaatcctcctgggtgtaaacggactcgtcaaactgctcaagttgctgcagatagtattctggcaaatgctcgttgtctgcaaagagctgcgcgacatcgccggcatccttcagctgatcgtcttcgcaatcaggctctgtgggttccgtttcatattggtcatcgccgctatcgtcggagctgtcggagctgagatgttcatcttcatacggaggagagttggcctttcgccgggaacgagccatgctgtggtaacgaggaatcgtccagtgaggagttgaggataaatgctcttggcaaaagagagccagggagggaaaaaagaagtgggaaaactcttttggaatgagtatcaaacatcgaaattccgacaagaccccaaggggaaggccccaatatatgaggccttccactgagcgcagcgtttccgtgccattgtgggaaaggctcctgagagaaaagagggacgcagcgttgacctgaatgaaaaacgcagcctgagtaccaagtgtggagaacaaaatgcaggtgcaacaccctcagggaacgctagaaaattgaggggtgtgctgcgccaagcggagattgcgtggccgtggtcagagatagaagtgcgtggcatgaaatttggcaaatcgacggcctaaaacggccgcacttgcggccatttttggaagcccgtttgccgtctgctaccttaataaagtatagataaagtagattttatacttaactataaccttattactaggtctttaaacttagtttttatagttaagaaagattctcttatactaatttctattaaccttacttatcgctatacctattatataggtaaggattaagtttagaaaatggaaatatatactaaaggtattaagttaaaaaaaggtactagagttacttatccctatataccttatattaaaggaaaaggatatatactcccttttaggaaagttagatctatctattcgaaccttagagaatttatctatctagatatctaaagttctatcttaattgctttatatagaggtaagagatattttattacctttatagataatactatacgttttacctaactattcttacttaagtctagattataggttactgaataatatatctagtttaagacctaccttaagacttagtttaggtatatagttaaaaaagtttatagggataatactatagagtataaacctcttataatttacctaaaatctaaaggaataatataggatcctacttccccttatataaagtagctaaatagtattatagagattaaaaattattaccttattaagcctttagtagctattataatagagtattagttcttaaagtacctctagggttatctcctagggggtattaactatataataaactatctttataccttaaaaattaggatatcgctatataaagcgctatatagtaaaaaacctaacttattaaatctttaggctctaggatactaatactagttcctaattcctaaagaaaaaagataaacgaagttagacccttatatagaggaagctagattaatcgcttataataaaggtaataactatatcctatataatatatagataaagaaaattaaatattctcgaaatattatctttaataaagtactaatactaaaggtatttcctaacctaaagtataatttaaatattaaaggtataaatttactatagtaggaggtttccccttttaatcgctatattctagttaattttttaaattaatacaattattatagagtacctatagagtaattcgacttctccttagttataaacgatatactataagtcctgagttatctacttttagtacctctatattttaatactcctctacttcccttagttaaggataatcttaataagagcctttttagcctagtaagtccttcccttaaacccttaaaccctataattcttaaagaataacttctagacctagaatccttttaacctagtaaataataataatattaatatagtaggtagctttagaaggtttatagaagaataataggataagctaagtacctatattaaagtagaactatagctacctatctaggaagaggttaaataaaatttctcctaggatttatcttaggatttatactatagttactcttattttaagttaaccctagataactgagcctttaacctaacttatatcttattattaagaacttaagaactagttaggaaaccttattattcctttaggtagtataaactaacttaagcttaccttaaaagcctttaaacttgttccttctttaatataaatgttttatatctacttattaagtctttagagattctacttaatctttactctatagtaatcttaaaagaaccttaatatataccttctaagctaaaacctactaatattagttttaagctaaaagattagaaggaagctatatcctatattaagaaagagaagtggcttactactacttataaagaactttcttagtaaataattaatagaatatagaggataatcccttaaggataaggaaggaagggttgtaaaccccttaccttatactaggtatttaaaatcaagtataataatacctataaagtgagacttattacttaaggcttttaataaattaaggatcttgatttctttaaagtttacgcggttattataaagctaatattatttaaaatctttatagctattatagctactataggttagctattatactatattaatattataatagtatttttatatattaagttaaaagaacctattaaaattgaactctctaaagggtaaagagaagaatttcctaattagattagtttcctaataaaaactatttatagcttaaaatagagtccttataaatagtattaactactatataatatactgattactataggatttagtaggatataatctaatcactctatcttttttaagaaggaatataggaagcttcctatctttattataatctatatcgataacctcctagtcttatatacctctaagagcgatatttaagaatttaagattataatctcgaagtactttaatatttctaataaaggatatcttaaacgatatcttataataaacgttttttataataaaggaaaaattctcttattataattcgactatatagagaagatccttatatactttagacttaaaagctataaactagtagctatacttatagataaaaaaatagccttaatcccctataagggtactataactaagttatagattaaggaattttagataaaggttagaactttaatatagcttatagtttcgataaggcctaatatctcttttatagttattaaacttatatagtatgcgaagaaccctagtaaagcctacttctaaatattaaagagggtatttaggtatcttaccggtataaagaatctagtcctctcctattctatagaaagagaagctttactctctagttattataatatagactaggtaggtctatatagtaaaaaaggtctattaacctctggttttatttttaaaataggaggtagccttattttatagatattaaagaaatagccttatatagtactatctattacagagagcgagtatattacagaagtactagcggtataggaagtaatctagttatcctaactgctttctaagatcggtatcgaaggcttcttagtaaagctaattcctatctatactaataataatagggcaattgcgcttaccttaaatcctgaattttatataaatataaagtatattataatccggttttatagacttcgagaggaagtcgcgaatggcttagtgaaatttgttaagattcctactaccgagatagtagtagatggacttacaaagccacttagaagagttatatttaagcgatggatttcacagatcggcctctcggtctataatataggttaagtttatatatatatataagtaggtatctggttttgtttttttatagagagatagtgtttaaactacgctggaaactcgactatttgttagtcgtggggggtgttcgaagttatgtgacctctctccgctcctaacaactatgttagtcctagcagataggtagtttccttttctctcttcacgcaattcatgagaactttccagagtgtctacatttcatccgtagactccttgattcatctctaacaattaattataacgatcatacgattacagagatctcctcaaaacaacactaatgcacgggcgtacatttctagcttagtgcgagcgacgatctcccaggatctggcgtactagttagagatcgagtattagttattgatgaaggtgcaggctacgagaagaagggtgatcaaccagaaagatgatgatatgaagtggatgaaagatgctgatctagctactgccaagaagctctctatatagctccatgctacaaagctaccagatcccatcctccagaaaccagaagaaacatctctgcaggcgtacaaagggaatgccaacacagcaagctgaacggcaagctgcatgcgagagaaacgaaagaaagagagaggaatgccacagagagggctatgaacagcatggggcaacagtgaatacttccaaatgcatcatcatttatgcggtgcgccggactgcgggagatcgtcgccgtagtcgcccgccctaagcctgctatgattcacatcgctgtaatccgtatttcaactctgctaaattcccctaggcagccagcgtatctgaccccaaatatcgagtcatggacacgcctgttgatcttttttaaattcccagtgggtctcctacttaaacagtgttagtgttgtcctaacgaaattgcgctaagcttatttataataacaatagcgcctctggaaaagtcgagtaactcatagatttatgatgatcgtataatcttcctataactaatgctcgatcctgcggtacttctgacactcgacccttggtatcgagttttcgtaagggctgtgtttccaccccaaaggcaaccttgtccatgaaagtattcctgccgggttattttctccataagggccacgttaagattaatagatttaggggattcagggattctagtttctaactattcaatgttgttatgtttggtgttccgaaattccgagggatccccgaccgggtattcctgacctgctaacccctgctagccctattcctgcttcgtttctgaacgcgatgcaacatcaactaatgtaggaggatacttacctgcgctggaagcttgatggcaacgaggactgttcaaatccctcaagcactgtagtcattgatcgctattcaacagggattctgggcagggcaacaacaagcaccatagaccaattatgggatatagcatagaaatatctagaactgtctacctttatgtgacaatcaatgaagcttcttaggagaatcggcggcgtatattcgggctaccgttttgagctagtaatgcagtggccagagggtgcttaggaatactacataggttagggtaagttatacattttctatagagttgatggatctacagaactacttcaactgaggccgaaggatcatggcttattgatatttttgggtatatcaggcgcattaacatgagcctcgggcttcacagaacatagtaacaccatatctacaacgtgtgctcatctttgaccaaatatagtatggaataattgcttgtaaagtatgctggatggcttagcctgctccgaaccctgccattgtagtcgcttattaaagaaacattatcaccagggtctgataccaatctagttaatgatatgcaaaggtggccacgacttccgtcctatgtctatgtatagctggtgctgtgctgtaggacatctccttgactaggcggatatgaaagggtcgatgctcgctatctctgggcggcttctctactaccaacgcactcatctttctatcgttctctgaccaagagccttttatcgaaaccatcacaatgtcgcttctcaaccacgccgtttatgctgtaactgttctggccaccattgccgcagcagtccccagcctaatcgctgccaggggtgaaaatttcctcgttttcaatggcaatagatcccttttggttgaaaccaaaccctctgcagagaccgcctaagacttgatagccatggccgagggaaatatcgattgcaagggctctgctcggtggaaaaactcggttctggctgtcacgatgcttatcggtaggttattcccagcaatacctacggcacttacctcgagtatgtttttcgctaactcgacaaagccattccaatactggatcttgtagtggaccctgcggtctttttttcaacggcaacactgtgaacttatagggcaggatttgatggacgcctacaatgaacttcggaaccgaggccattgcagccattgtggacgcaaacaaatcgctaacagctgtatgatcaagattgaccgggtcatgggttgctaaatggggctgcgccgtgttaatcggataggaggtgcataccatatacatctatttatggtcacagggtcgcagttttggctttcatctagtcactcatgggtgaatgggcttgcacgagtttgaagatgagaaatgctaccgacacgcgaaaattgctaccgtcacgttgcccaccatactactttaggtaagtctcccgctggccgcaattttcaaccagcctttgtaannnnnnnnnnnnnnnnnnnnnnnnnnnnnnnnnnnnnnnnnnnnnnnnnnnnnnnnnnnnnnnnnnnnnnnnnnnnnnnnnnnnnnnnnnnnnnnnnnnnnnnnnnnnnnnnnnnnnnnnnnnnnnnnnnnnnnnnnnnnnnnnnnnnnnnnnnnnnnnnnnnnnnnnnnnnnnnnnnnnnnnnnnnnnnnnnnnnnnnnnnnnnnnnnnnnnnnnnnnnnnnnnnnnnnnnnnnnnnnnnnnnnnnnnnnnnnnnnnnnnnnnnnnnnnnnnnnnnnnnnnnnnnnnnnnnnnnnnnnnnnnnnnnnnnnnnnnnnnnnnnnnnnnnnnnnnnnnnnnnnnnnnnnnnnnnnnnnnnnnnnnnnnnnnnnnnnnnnnnnnnnnnnnnnnnnnnnnnnnnnnnnnnnnnnnnnnnnnnnnnnnnnnnnnnnnnnnnnnnnnnnnnnnnnnnnnnnnnnnnnnnnnnnnnnnnnnnnnnnnnnnnnnnnnnnnnnnnnnnnnnnnnnnnnnnnnnnnnnnnnnnnnnnnnnnnnnnnnnnnnnnnnnnnnnnnnnnnnnnnnnnnnnnnnnnnnnnnnnnnnnnnnnnnnnnnnnnnnnnnnnnnnnnnnnnnnnnnnnnnnnnnnnnnnnnnnnnnnnnnnnnnnnnnnnnnnnnnnnnnnnnnnnnnnnnnnnnnnnnnnnnnnnnnnnnnnnnnnnnnnnnnnnnnnnnnnnnnnnnnnnnnnnnnnnnnnnnnnnnnnnnnnnnnnnnnnnnnnnnnnnnnnnnnnnnnnnnnnnnnnnnnnnnntgacggaaaaacggtggtaaggcgagtgtattttgtggcagaaaaatcttaataaattctctaactctctaaaactgacaatagtcctaaaacatgacaatctgatggacaacttaggaatcaaaacaaacaaaataaaagaaagggtgtttttttgggcgaaaaaccactgagttagtttttctgcagaaaaaccagcctggtcaatcacgtgacccagctgtatcagggatgaaaaatgacagtattcatcctagattctgacatgttgtcttattggctaatcgcttcataccgcctacgagcagttctgcccgtcataccccatcaaaatccatactcctttccacctcatttctctacaacttcattcaggcagcgttgtatagttacggagtagggagtaccagatcaagttgggtacgtacccgggccgcgcatcctatacctctttgattaacttcgttgaatcaagtgtcatacagaatctctgattgtttccgtcacttaaacagcattatacccctagagatttgcaattttatgaccaccagtcggagtcgggaatttttgctacgctggtcacgtttatattttggattaattcattcatgtctaagtacagcatcgttgaaagatttataggacgccctggggcggccgacaatcttgttggagataatgtcacattggtccttaaagactaggacaaagtaatccggggttaaagctctttcaaatgtaccaaccgtcccagaattctcatggtgaacatttggctgctgcttcacttttgaggccaacccccctaattgggataggaaaaggattttagggttacatttgggcggtcttagctagtgggtctagtggttcttagctcggcattaactgacagctcataaatgtcagatcccgttcgttcagatcccgttggtcaaaacggttagaggggctggtcctgtgggtcatttagttgcatctaaatgtggactaggtgacccgttcgtggatcatacccttacctgtctagggaaaaggtctccgttgtccctagttcttccccatgtagactaagacaatctctgagctggcttattcttctgccttgaaggaggcttttggtgttctccttaatttcccccaggtatcccacttaccattctcgtcatattcaagcttctcaacatgcaccaatcatggaacaagtggtgttaccgtcactattcccttcggcggatgatatccacagtcgccattggcgcttgtggtgtttttatctacttaatatggtttgggatgaactcagaccgtgataatgtgccccagctcctcacacaacttatcccagcaggtcactgcacctgccaatcatctacttcatttcaatgcgccgactgcctcacctgtctagcctcgccaccgctattggaaccagaacaccatgaaacttggagtttccaatacggaagagacgaccaaaacctaggcctgagccagattcagtgtcaggcagcattccccggtctcttccaggacatccagcgaggggttgcgtattggaagtcgcaagggagcatatcaagaaacgatctgagcatggtcccattccgagatggtatggcccgcgctattatctccaacggagaattgtacgtcgtggcgacaagagcaaaatgggatgatcatcggcgcaagatccttagtactctagggtctatccatcgggcactatctgcgtcctcaaatcgtacctcgcaccccacaatcgagtttatcttctcgatcgaagatcgcgtggatgacgttgatgcggccagccacccggtctgggtgttatcaagaaaagcatctgaggagtcggtcattctgatgcccgacttcggatactggtcctgggccaagagtaacatcggcccatacggacaagtcgtacagagcatcatggcggctgaatctaatatgaaattcgcggataaagaacggaagctggtctggcggggtaagttgagctttgcaccaaagctgcgtcggacgctcttggacattgcccggggtaagccttggggtgatgtgaaggagttggattggagcaagaaggtcaacttcttgtcgatggaggatcactgtcggaccatgtttatcgcgcatgttgaaggtacgtttttttttcacaacccaaatttgctatacaaggctgacagatatcgtcgatattcaggccgcgcatactcggcatcgcttaaataccgacaagcctgtcggtccgttattgtggcgcataagctgcagtacatccaacatcaccactatctcctcgtatcgtccggtccggaacagaactacgtggaagtcgagagagacttttccgatcttccgaatctcatggacgaactgttggagaacccggacaaggcagagcgtatagccaataacagtatcaaaacctttcgagaaagatacctaaccccagctgctgaggcatgctactggagagctctgtgggagggatgggctgaagtctcggcgaatgtcacacgcgacgttgaaccaccggttaataggggacttcggtatgaatcttttgtgttgctagacagtaacgatatgttcaagttcgacatgtcgaacagcttttagataacagcaaacggcttaactagttagcttcaatccagactagcttcgtcccttcacaccgacgctccattccgagccttccggtaagaccggagaatatagaacttcccctgtgggtcactagttagtaccgtgaataaacgcactattgacgtaaatatctgctttcttccgtctaaaatttttaaactatacagataggtcctaggagcgttattaaacttggtttgattgataaatacaatctccggctttatctcggttacaaaatttgtggaatctaatcatggtaaaggattacgcagatatagtataagctagagaactaggagtcccctctagtgcggttgtagtaaggctaaaatttatgattagaggatctataatggaatgccgtacaatttgtatatgaactgtcacgacctgcaatagatcgctatcatatgctttatgtacttgctcgcttactgatttcatcgtttatctcattacatagattgtttgctagattgctaagcgagaaggttcgaggtttgcaacgtttgcaaagagtcaagaattgccgtgtaaagaaaatagatttatgtggcaaaaacaaagccaaaaacatacaacagtgaggattcgctggtggtcacccacccaactactaactcaccggcgnnnnnnnnnnnnnnnnnnnnnnnnnnnnnnnnnnnnnnnnnnnnnnnnnnnnnnnnnnnnnnnnnnnnnnnnnnnnnnnnnnnnnnnnnnnnnnnnnnnnnnnnnnnnnnnnnnnnnnnnnnnnnnnnnnnnnnnnnnnnnnnnnnnnnnnnnnnnnnnnnnnnnnnnnnnnnnnnnnnnnnnnnnnnnnnnnnnnnnnnnnnnnnnnnnnnnnnnnnnnnnnnnnnnnnnnnnnnnnnnnnnnnnnnnnnnnnnnnnnnnnnnnnnnnnnnnnnnnnnnnnnnnnnnnnnnnnnnnnnnnnnnnnnnnnnnnnnnnnnnnnnnnnnnnnnnnnnnnnnnnnnnnnnnnnnnnnnnnnnnnnnnnnnnnnnnnnnnnnnnnnnnnnnnnnnnnnnnnnnnnnnnnnnnnnnnnnnnnnnnnnnnnnnnnnnnnnnnnnnnnnnnnnnnnnnnnnnnnnnnnnnnnnnnnnnnnnnnnnnnnnnnnnnnnnnnnnnnnnnnnnnnnnnnnnnnnnnnnnnnnnnnnnnnnnnnnnnnnnnnnnnnnnnnnnnnnnnnnnnnnnnnnnnnnnnnnnnnnnnnnnnnnnnnnnnnnnnnnnnnnnnnnnnnnnnnnnnnnnnnnnnnnnnnnnnnnnnnnnnnnnnnnnnnnnnnnnnnnnnnnnnnnnnnnnnnnnnnnnnnnnnnnnnnnnnnnnnnnnnnnnnnnnnnnnnnnnnnnnnnnnnnnnnnnnnnnnnnnnnnnnnnnnnnnnnnnnnnnnnnnnnnnnnnnnnnnnnnnnnnnnnnnnnnnnnnnnnnnnnnnnnnnnnnnnnnnnnnnnnnnnnnnnnnnnnnnnnnnnnnnnnnnnnnnnnnnnnnnnnnnnnnnnnnnnnnnnnnnnnnnnnnnnnnnnnnnnnnnnnnnnnnnnnnnnnnnnnnnnnnnnnnnnnnnnnnnnnnnnnnnnnnnnnnnnnnnnnnnnnnnnnnnnnnnnnnnnnnnnnnnnnnnnnnnnnnnnnnnnnnnnnnnnnnnnnnnnnnnnnnnnnnnnnnnnnnnnnnnnnnnnnnnnnnnnnnnnnnnnnnnnnnnnnnnnnnnnnnnnnnnnnnnnnnnnnnnnnnnnnnnnnnnnnnnnnnnnnnnnnnnnnnnnnnnnnnnnnnnnnnnnnnnnnnnnnnnnnnnnnnnnnnnnnnnnnnnnnnnnnnnnnnnnnnnnnnnnnnnnnnnnnnnnnnnnnnnnnnnnnnnnnnnnnnnnnnnnnnnnnnnnnnnnnnnnnnnnnnnnnnnnnnnnnnnnnnnnnnnnnnnnnnnnnnnnnnnnnnnnnnnnnnnnnnnnnnnnnnnnnnnnnnnnnnnnnnnnnnnnnnnnnnnnnnnnnnnnnnnnnnnnnnnnnnnnnnnnnnnnnnnnnnnnnnnnnnnnnnnnnnnnnnnnnnnnnnnnnnnnnnnnnnnnnnnnnnnnnnnnnnnnnnnnnnnnnnnnnnnnnnnnnnnnnnnnnnnnnnnnnnnnnnnnnnnnnnnnnnnnnnnnnnnnnnnnnnnnnnnnnnnnnnnnnnnnnnnnnnnnnnnnnnnnnnnnnnnnnnnnnnnnnnnnnnnnnnnnnnnnnnnnnnnnnnnnnnnnnnnnnnnnnnnnnnnnnnnnnnnnnnnnnnnnnnnnnnnnnnnnnnnnnnnnnnnnnnnnnnnnnnnnnnnnnnnnnnnnnnnnnnnnnnnnnnnnnnnnnnnnnnnnnnnnnnnnnnnnnnnnnnnnnnnnnnnnnnnnnnnnnnnnnnnnnnnnnnnnnnnnnnnnnnnnnnnnnnnnnnnnnnnnnnnnnnnnnnnnnnnnnnnnnnnnnnnnnnnnnnnnnnnnnnnnnnnnnnnnnnnnnnnnnnnnnnnnnnnnnnnnnnnnnnnnnnnnnnnnnnnnnnnnnnnnnnnnnnnnnnnnnnnnnnnnnnnnnnnnnnnnnnnnnnnnnnnnnnnnnnnnnnnnnnnnnnnnnnnnnnnnnnnnnnnnnnnnnnnnnnnnnnnnnnnnnnnnnnnnnnnnnnnnnnnnnnnnnnnnnnnnnnnnnnnnnnnnnnnnnnnnnnnnnnnnnnnnnnnnnnnnnnnnnnnnnnnnnnnnnnnnnnnnnnnnnnnnnnnnnnnnnnnnnnnnnnnnnnnnnnnnnnnnnnnnnnnnnnnnnnnnnnnnnnnnnnnnnnnnnnnnnnnnnnnnnnnnnnnnnnnnnnnnnnnnnnnnnnnnnnnnnnnnnnnnnnnnnnnnnnnnnnnnnnnnnnnnnnnnnnnnnnnnnnnnnnnnnnnnnnnnnnnnnnnnnnnnnnnnnnnnnnnnnnnnnnnnnnnnnnnnnnnnnnnnnnnnnnnnnnnnnnnnnnnnnnnnnnnnnnnnnnnnnnnnnnnnnnnnnnnnnnnnnnnnnnnnnnnnnnnnnnnnnnnnnnnnnnnnnnnnnnnnnnnnnnnnnnnnnnnnnnnnnnnnnnnnnnnnnnnnnnnnnnnnnnnnnnnnnnnnnnnnnnnnnnnnnnnnnnnnnnnnnnnnnnnnnnnnnnnnnnnnnnnnnnnnnnnnnnnnnnnnnnnnnnnnnnnnnnnnnnnnnnnnnnnnnnnnnnnnnnnnnnnnnnnnnnnnnnnnnnnnnnnnnnnnnnnnnnnnnnnnnnnnnnnnnnnnnnnnnnnnnnnnnnnnnnnnnnnnnnnnnnnnnnnnnnnnnnnnnnnnnnnnnnnnnnnnnnnnnnnnnnnnnnnnnnnnnnnnnnnnnnnnnnnnnnnnnnnnnnnnnnnnnnnnnnnnnnnnnnnnnnnnnnnnnnnnnnnnnnnnnnnnnnnnnnnnnnnnnnnnnnnnnnnnnnnnnnnnnnnnnnnnnnnnnnnnnnnnnnnnnnnnnnnnnnnnnnnnnnnnnnnnnnnnnnnnnnnnnnnnnnnnnnnnnnnnnnnnnnnnnnnnnnnnnnnnnnnnnnnnnnnnnnnnnnnnnnnnnnnnnnnnnnnnnnnnnnnnnnnnnnnnnnnnnnnnnnnnnnnnnnnnnnnnnnnnnnnnnnnnnnnnnnnnnnnnnnnnnnnnnnnnnnnnnnnnnnnnnnnnnnnnnnnnnnnnnnnnnnnnnnnnnnnnnnnnnnnnnnnnnnnnnnnnnnnnnnnnnnnnnnnnnnnnnnnnnnnnnnnnnnnnnnnnnnnnnnnnnnnnnnnnnnnnnnnnnnnnnnnnnnnnnnnnnnnnnnnnnnnnnnnnnnnnnnnnnnnnnnnnnnnnnnnnnnnnnnnnnnnnnnnnnnnnnnnnnnnnnnnnnnnnnnnnnnnnnnnnnnnnnnnnnnnnnnnnnnnnnnnnnnnnnnnnnnnnnnnnnnnnnnnnnnnnnnnnnnnnnnnnnnnnnnnnnnnnnnnnnnnnnnnnnnnnnnnnnnnnnnnnnnnnnnnnnnnnnnnnnnnnnnnnnnnnnnnnnnnnnnnnnnnnnnnnnnnnnnnnnnnnnnnnnnnnnnnnnnnnnnnnnnnnnnnnnnnnnnnnnnnnnnnnnnnnnnnnnnnnnnnnnnnnnnnnnnnnnnnnnnnnnnnnnnnnnnnnnnnnnnnnnnnnnnnnnnnnnnnnnnnnnnnnnnnnnnnnnnnnnnnnnnnnnnnnnnnnnnnnnnnnnnnnnnnnnnnnnnnnnnnnnnnnnnnnnnnnnnnnnnnnnnnnnnnnnnnnnnnnnnnnnnnnnnnnnnnnnnnnnnnnnnnnnnnnnnnnnnnnnnnnnnnnnnnnnnnnnnnnnnnnnnnnnnnnnnnnnnnnnnnnnnnnnnnnnnnnnnnnnnnnnnnnnnnnnnnnnnnnnnnnnnnnnnnnnnnnnnnnnnnnnnnnnnnnnnnnnnnnnnnnnnnnnnnnnnnnnnnnnnnnnnnnnnnnnnnnnnnnnnnnnnnnnnnnnnnnnnnnnnnnnnnnnnnnnnnnnnnnnnnnnnnnnnnnnnnnnnnnnnnnnnnnnnnnnnnnnnnnnnnnnnnnnnnnnnnnnnnnnnnnnnnnnnnnnnnnnnnnnnnnnnnnnnnnnnnnnnnnnnnnnnnnnnnnnnnnnnnnnnnnnnnnnnnnnnnnnnnnnnnnnnnnnnnnnnnnnnnnnnnnnnnnnnnnnnnnnnnnnnnnnnnnnnnnnnnnnnnnnnnnnnnnnnnnnnnnnnnnnnnnnnnnnnnnnnnnnnnnnnnnnnnnnnnnnnnnnnnnnnnnnnnnnnnnnnnnnnnnnnnnnnnnnnnnnnnnnnnnnnnnnnnnnnnnnnnnnnnnnnnnnnnnnnnnnnnnnnnnnnnnnnnnnnnnnnnnnnnnnnnnnnnnnnnnnnnnnnnnnnnnnnnnnnnnnnnnnnnnnnnnnnnnnnnnnnnnnnnnnnnnnnnnnnnnnnnnnnnnnnnnnnnnnnnnnnnnnnnnnnnnnnnnnnnnnnnnnnnnnnnnnnnnnnnnnnnnnnnnnnnnnnnnnnnnnnnnnnnnnnnnnnnnnnnnnnnnnnnnnnnnnnnnnnnnnnnnnnnnnnnnnnnnnnnnnnnnnnnnnnnnnnnnnnnnnnnnnnnnnnnnnnnnnnnnnnnnnnnnnnnnnnnnnnnnnnnnnnnnnnnnnnnnnnnnnnnnnnnnnnnnnnnnnnnnnnnnnnnnnnnnnnnnnnnnnnnnnnnnnnnnnnnnnnnnnnnnnnnnnnnnnnnnnnnnnnnnnnnnnnnnnnnnnnnnnnnnnnnnnnnnnnnnnnnnnnnnnnnnnnnnnnnnnnnnnnnnnnnnnnnnnnnnnnnnnnnnnnnnnnnnnnnnnnnnnnnnnnnnnnnnnnnnnnnnnnnnnnnnnnnnnnnnnnnnnnnnnnnnnnnnnnnnnnnnnnnnnnnnnnnnnnnnnnnnnnnnnnnnnnnnnnnnnnnnnnnnnnnnnnnnnnnnnnnnnnnnnnnnnnnnnnnnnnnnnnnnnnnnnnnnnnnnnnnnnnnnnnnnnnnnnnnnnnnnntggcttaagtacggctgagcggacgggaagccctattttccacaccctatggtcgtatatactattatgttctagtatgctaactatatcctattgtttaccttttgctacctattactattcttattctagtgattcaactagcttctcttttcaagtctatatcaagtgctgcggctcactaatccatagttcgtgggtttatttcatttggcaagtgaagaacaagcatctctgagtcctaccgacccattcatctccatcttcggctttcagccgcgatatatttgaaaaagccaggaggaaaagaactcggatgtgaacagcaaagatattatatgaaatatagctaactacgcatagatggaaatacctcattttttcgttcacgttcttccttctctttaaccatcttctcactctgtcacaattcagcaacagcacctatcttttctcacgttctaacctacaatcaattcctattttcattaaaccattttagccaatggctaagtaggtctctatggcttctgtagtggctaaattgtactaaccttattagtcgtctccccgagcctacttcggcagaccagggaatcccagtcctcatcccccctatctccccattctatattagaagccgaatggagccctggtggctctaggctcagtaggctcagagaattcatgagctgttgtgttcaaatcattgtaatgatcatttttcggcaatgaggttaacgtgaatataaatcactatatcaatatcgtgtaaagatatcagtcaaattgcccgcattctaaattttatatctgatattggttgattacctgctcaagatcccactaacaggacccttagcgttcctagaatcatacttggccccatgatacatggcatggtccccaggcacaataattattgctcccagagtaggaataattttcccacagggcctataattccggggaacgagaggtggtagagagtacgggcgactccaccaaagtgctagggaggtcgtgctacttcaaagtggcggaaggtaataccgaactgatcatataagagggtggtcgagttggtacagtataagccccttatattcgttcttaccctcccataaattgaggagctaaacccccaatttgctccaggcccaagtattacctcaatatctgtagatttaatatatctcattttggcgctttactgtacgaatctatgaacaggaagtaaatggttaaattgcgcggccgaagcttctccaaatcaccctcaatctgcaactattgaaatgaaaccagtctcgcttgggacaggaagtcctctagacctaagcttgctagcccttttagctcttttctttgaggacatatttgcccaattcccatacagacttaagtccgaccatgagatcctcgctatgtagccctgatcagtagcctctggtagtatttcagtattagacgtatcaccgggtgacaaagaagcgcgcgaccagctgtcagtatcagcagacacttgaggaatgatccactgttcgctacctccctcagcaggagactcttccaggacaggctcgagctcaggctctggttcaggcgattcgacgacaggctctggtacagcctcttcgaaggcaggctctggtacagcctcttcgaaggcaggctcaggctcaggctcttcgaagacaggctctggtacagccgcttcgaagataggctcaggctcaggctcttcgaagacaggctctagtacagcctcttcgaaggcaggctctggtacagcctcttcgaagacaggaaggctctggtacagcctcttcgaaggcaggctctggtacagcctcttcgaaggcaggctctggtacagcctcttcgaaggcaggctctggtacagcctcttcgaaggcaggctctggtacagcctcttcgaaggcaggctctggtacagcctcttcgaaggcaggctctggtacagcctcttcgaaggcaggctctggtacagcctcttcgaaggcaggctctggtacagcctcttcgaaggcaggctctggtacagcctcttcgaaggcaggctctggtacagcctcttcgaaggcaggctctggtacagcctcttcgaaggcaggctctggtacagcctcttcgaaggcaggctctggtacagcctcttcgaaggcaggctctggtacagcctcttcgaaggcaggctctggtacagcctcttcgaaggcaggctctggtacagcctcttcgaaggcaggctctggtacagcctcttcgaaggcaggctctggtacagcctcttcgaaggcaggctctggtacagcctcttcgaaggcaggctctggtacagcctcttcgaaggcaggctctggtacagcctcttcgaaggcaggctctggtacagcctcttcgaaggcaggctctggtacagcctcttcgaaggcaggctctggtacagcctcttcgaaggcaggctctggtacagcctcttcgaaggcaggctctggtacagcctcttcgaaggcaggctctggtacagcctcttcgaaggcaggctctggtacagcctcttcgaaggcaggctctggtacagcctcttcgaaggcaggctctggtacagcctcttcgaaggcaggctctggtacagcctcttcgaaggcaggctctggtacagcctcttcgaaggcaggctctggtacagcctcttcgaaggcaggctctggtacagcctcttcgaaggcaggctctggtacagcctcttcgaaggcaggctctggtacagcctcttcgaaggcaggctctggtacagcctcttcgaaggcaggctctggtacagcctcttcgaaggcaggctctggtacagcctcttcgaaggcaggctctggtacagcctcttcgaaggcaggctctggtacagcctcttcgaaggcaggctctggtacagcctcttcgaaggcaggctctggtacagcctcttcgaaggcaggctctggtacagcctcttcgaaggcaggctctggtacagcctcttcgaaggcaggctctggtacagcctcttcgaaggcaggctctggtacagcctcttcgaaggcaggctctggtacagcctcttcgaaggcaggctctggtacagcctcttcgaaggcaggctctggtacagcctcttcgaaggcaggctctggtacagcctcttcgaaggcaggctctggtacagcctcttcgaaggcaggctctggtacagcctcttcgaaggcaggctctggtacagcctcttcgaagataggctcaggctcaggctcttcggggacaggttcaggatcctcaggggatggccctcgaagaggggattcttctgaaatgatgccgttcagtatctttgctaatgattcccaaaagaattagttcagtctgattaccatatgttgaatatgttgaagataatttaccgtgctgatctttcatagaacataagctaatagatagcatctcgagaatcatcttcatcactgcattatcaaattgatggtcctggccgagaatattgtaaaatgcgtgtaagtcaagccctgcaacttcaggctttggtagtcgctgcaggtttcctcgaatgtaacttggaagccaggtttcatctgcaggaagtcttgaaaacacgtccctcacgacccgcagtatttcaagaataggaaggtccttatctaagtgctccatcttctgcttagcaaggatttcaaggtcagttaggccccaagtccttaatgtataatagactagaacgctcctcttatattctctggcgagatctgatacaccttcatcaagaggcgagctgactgtctcgtagccgccggtatataagaagtgcagcacggtatacccgacatcttcattaacattaggcatgatgatagtcgatgacccaggagaggaaggggtaagctttaggtaattccgaaggaaataagcgggaatgccatattgcttgctccctataatgaaggtgacgagagggaactcgtagggccagtaaataggtcagaaaacgctagttttgacttattcgaagaactcacgatgacaaaggtcgatagtagtcaattttaggagagacctctggggtaaggagtcgcttaggctcctcattcgagttacgctgcttcgttttcttttttgccatgtttcagtcttcaacttcgccagctatcaagtgactctcataaaattttcaaggaaaggtatcaagaattaagatgagaggaagcctgactacatcttatatatgcggaggataagggataagtagggtaatgcaagtatgagttgtcctgcaaagtggtcgaaacatgccatctgtgccctgaatggcaatttagtgtcaaggattgaaatgcagcatgagtcagtagatggcttattacatatttcagctggttatcacttctgaggagttttcggtttgggaagacgaatctgcgccgctcaattctaagtgtgctggaagcaaaatgtgatatccctggtaatcctggactcctatcagttgctgtcctgtcagaaaccttccataatttggtaccgtatcaccgcttccaagacagatggtgcttctaagctgtgagcagcgaattcacgtggtgctataccatccaatggattatgtccaggacacgtgtggttttcgttagcgctaaagtttcatatagtggcgtactcaccacaatcctatgggtagctgaattatcactttacaattcacaaaacaacatcgctcttagaatcacctgcagagtctttcatctatcttttccttattcgccaatctcccattcggcaaaggacagccataccctagaggctccatgataactagacaaaaggtacacacaaggtaaggccagatcatgcaggtatgtgttggcagcccatgcagggtaggacacaagaattttactgatacaaaggcccgaggaactcagcccaaagctcattctccttggctaatataataccaccaacgaagcaaggcaataatgggttttctctggatcgcaggcatacctcgtccgaagttgacagattttgagaagatcgggaaatccattacggaagtggagcatttgtcttaaattggattgaatcgtccagctctacattgatgtccccgaatgcccgcctctttgatctccacccaaaacccctccaaaaaaaaagttgccaaagactcttggcccatttacattgctcaaaccgtgtttcgtcatcctgacaattcactcgcactacttttccgttcgctgtacattggaaacccttcaaaaagcattcaccaatttgacttgataaccggataaccgatcgaaagaacatcatgggtaaccggcaagtgagcaagtaatgaaagtcactatttacaagctctgttgctgattaagcccccgggctgtcacttggatataggagtgacaattggaagcattcagcttgttgactgacgagataatttagtttatgtctagcatatacgcataaatccaatccatcctttagtttgctaatattcgaacccgttccccgattccaaagaaaaagaaaagaaaatacaaaaagaaaagaaagacgaaaaaaaagttctaaatctgcttcccaaatggctcccccttcgtcttcccttccgtatgcggaggcagtttttcacgatacccaaactcctgctatttaatatgaactcggttgaatctttcataggtcttttcattcttattacgatccacattggctaagcatttggtaacatccttttcaattgaatccatggcgcggttcttgaaccacgcagtttgtccctcgtcgctttgtttcgtgacgggggtgtatatggctgtgtggcatacctcttctgtcccggtcatgttgtcggtcttgctcttccaggggcagcggtaggtgtagcggcagtagaggaagcctggtccgccgtgggacattgttgttcttgggtctgggttggttatggaggaaatttatactcccaagtccttcaaggagagaattttacgctatgtgaaataaagaagtataggagaagaaacagaaacaatattgagcaagttgataagaagtagaagacggtatttgagccaaggtgggaaagactggagaactatacccctcatttacttctaaaagtgaggggtaatcacaaggcggtgtttgaagcgctactcgacacgtcgctgcccaaatgagatttgttgggcagtgacgtgtcgggtataggaaacgagacatatggcagccgatagcgctcatatatcactgacgaaattcgtaccacttctccgcataaagctttaggctagactaaactattggccagcccgaccattttgagtgaggctcaaacgcggccattagtcgggtggatgccgcccgggtgagaatttagtgagcgccgcttttgagtcgcgcggcagggagtgagcaggctgagttgattatagatgggaaggtgggccaggtgagatcttccctgacgcgcgattcgcgcgaccactcgagccgagtaaccatgatcaaaattaaccttgtaataattggaccatcacatacccttcaggcattagccatcttagcacctatacatagccacaaagcaatctgtaatcaataatcttgtcacatcaaatgtgtgcctgatttgttgtttatctaagcgcgatccctacattcagccataaagtacggggagaaggctatatggcagggccatatagtgagaagcgggtctaacccgttacaagagaagagaaataggaggagaggctagctaggactatctaccatatggaggcatcacgtggaatcacgtgatcctcccaataagatctaagcgatctagggtagtgggaaatgtatacggtgtaggactccctacgtcggtcaccaactatgcggctaaaaggtaaggctacccgttctaacccgaaccgggattaataacaaatagccaactaggcttacataaggttccactgctaggaaaataactcaattaactcctactagctagctagatcttagggggaaagatgaaggtatttatgtctacctccatctgccctctgataccgcctcaaactgggataaaagagtggatcccagtttggcccctgacaacgctacacgaaataatgcagaaaagggttgcaaccttggaacaactaactgccccacttggattttctactaagcctatctaggaaataggcagcattatcattaaacaaagaaatgagtttgctactaagcctatttaggaaatgtttgcctttgtaggtagagcttcagtatttatactcttcacttctggcgtttcctctcgaaaattttcttcctctcactatcccaactcatctcttctcaactcttctcaactctcctcttcactcctggcgtttcagcttaagatttttcttcatctactcatcgtaactcaaacgcaactcaactcagcttggctcattaagctagcttaactcatctcaactcaacttgtccttcgtgtggcttgtctaagatgacaccattcaaagttgcgaagaaaagaacgccaactaaacaaagaatgaaagatgccatgctcgacctccacagcaagacacaaaaactatccttcacccagctgaaggcctatattgaaaaccttacatcaatctttgaggaaggccagtttgagcgaccaacgatcgcaatctcttccctgaatatcggcgacgtccaagttttactcaagctcactcattcattggacaaccttgagttctgtaacagaactccggttgaactgtcccccgtctgcggtacgtatcccttaaggaatgttcaagtcaatgtaacacataactgatttgaccaagctgaatggatggacatgacgagagacgcgtttggcaaaagtggacccaatgaagcgttaacccggatcactctcaacaacctcctcatcttcgcccatcattttgtcacctcgcaacctagcaccacttcctcagacatgaacatgaacgacttgaacttgaatgccgaaggcctctggcgttatggccccgtcatgcataaggacaccaagcacgaccttgttgggcgccctgactatagcctgtggtacggcaatgaagaggatgtggctgtcagtgttgttgtggttgaaacgaagggagttgaatctgtgacaagcggggtctctcaaactctcggctacatgggttgcgttcacagacgtcgaaaagacctccagaagaaagatgcaactgtgtatggtgttgtgtctgatggccagtgttggtggttcttgaagattaacaatgactcggaggtgagtaaattataccatgaaatcatacatattctaacttgaatagtggtcagagtatatcattactgcccgtcacggaaattatcaggaggtggtaggaatacttgtgcatatgttccgaactgctgcgaccatgtctcccgctcagtcagagggaacatcacttcagacccactcaaaggaggcgtctgctgaatcatatatggagtttgatggggaggcggtggaagatgacgatgaggaagaattctgattgctctgttctgtcctgtccctgttcttttctgcttcttttttttttttattcttataccctgattccctcgaacaaaagtttttttattttctccatatggattccctttgtatcctgattccgcatgatcatattcaatcggctacacgagtgttgcagaaagtagccatacccgatctctagggcctcaccgagttcttcaggtcctggccagacactaaggtcctttgaggagtcgttcgagtattgcgcttcaccgaatcttgtccttttttttccttgccccgttcgcactatgcgccgatcaaccttttaaatattggtgaggttagggcgggcagtattagggtgttcaaacttatgcaccgtcactgtatatcaatggtatatcttggcattagagtccgagaaccaattgaagagtgtaggtagtgacaccagtttcgggacgcaatataactgttctaacttctcagggattattcgtgaacatttcatggatagatacaatacagatgaagatctaatagagaaaacactgtatgtgttgatggacgcgaagagaaagagagagggggagcgtgcaggcaaactatccgggttctagttatcttatactcttggttgaagacgtattgcggaactaaggggtctaatgaatgggttttcaactctctgtatttctgtatcggctccgctggcaatttatagttaactagttagtatctagtactatccaatagaaaccatgcgatccttatagaatctcaagacgctcctggagtgctttcgggatattctgttcggagaacatattttagctggtaaagaaattcaaagaaaatcatggcagagtaagagaagcgcctcggggcttgactatttgtatttttttaggactgacattggtttggagtgagttggcccctatcacctcaagggtgagaattgtcaccccgttctcacctctctcaccccagtctcaagacttctcacccatatcacccgaactcaccctagagtgccgcttaggtgctgagggcacattgatcatcacattcgtgggagaggtagatagagtgagagatttaggttgtataaatggctgagtacaacaatgataggcagggtgagaattgggtgagcgccgctttatggtcacacgacgggggtaaaaaggtgtgctatagacagaataagaatctgggtgagaacccggtgacaatcgccctactaattgcggagcgaagcgaagcaattataaatcagaaggtcgtacgtaccccggagcgagatttatgctggaatatacataccgcctataagaatggtacaaagatgaaagaattaatcactttataattctctccgactattccgacgggtggcaaatatattcctattttttagataatgtggctagatatcgagctaacataggcttgtaggggtcgctgtccttcatgcaagcaaatattttcttgtacttttcctccgcttccagcataatgcgctcctcatcgtcaaatctgttatcatctggatccttccaataaagcgttcgatcgttattatctgcccagtcatccactacctttccatttggaataggagtagcaatgccttcaaggatcttcaatgatttggaatccctttcgcgcgatagtcgttcaagttgagcatccacatctagatcagactctaggacagacgacttgaaaccatgcggcccctctccccgtccataaacacacagagattcgagattgggaggtaaatgatcaattagattgaaggattgaggcctgatccgaccatcggggaatcgatcccggctggatcctacaccccgcgcaagatagcatagagtgtggacaccgagactgagactcttgagtttcgggaaatctttcaatgagatacaggatggtggaacttctagcttgtgagtggctagatcacgaagctcatctgcgtattgttcttcataaaatttctgttcatcctcatcgagcccttcgttctcatccagctggtaattcgtatcataaaactcttgccaattcgtacaagattccatgtcaagatccagtacctctagggtatgtcgatgaaaccaaagggactgaagtaatggcaccacgcttagtatagtaatacccccttccgggtcctttcgcccatctacggtgaaagtgaagctctttagtgtttttgacgactcaatgattcgacaaagatcatattcctgcatcaaggagtgtgtgaagctaatcttgctgtaattggcgcagtgcggtggaagtggtagtcctgcgttgttatcccacgatgctaatttgaaagtgacggactcaatagctggcagttttcgtaccacgtttaggcgatcgtagtatggatcttccacatatgtcgtgccctggtttcgagcatcatctgggtggaagttgatctccttgagattttggcagtatggaactgagccgggtgctgctttagaagctcgctggagaagtgacttgagcatgttttgagggaattctatgggatacatagatagggattcaaggttgggggcatttgcggctagcatcataataagcgcatctctgaactcgattgctttcggataagagggagacctatttcagagtaagtcatataacattaagagacgtgcatggagggaaaataattacctaaagtagagcggatcttgccaaaggatggataggatagattctctatcctggactttttctacgccggccttcttgagggcctgcttgagtctgtggatatcctccggagaaaacgatcgttgaggaacgggctcggattcgtagggaggaaagccggagcccgtttcactcccatacaagactaggcgacgaagatagcctccgagagaggggttggccaagatttcaagcagcatgttctgaccagcctgcagctgaactgtaaaactctcctgtccttctcgaccaagctgaaattcatgatatttttggcgattggagacatcgctgatactatgcagtcctcgattttggtgcgacaaggccacaacatcccccatagtagggagactgttgataattttgacgagcacttcaggaggaagattttgtaacggcattcttcgtgatgtgagacttctcctgggaaaaaaatgcgactgaaaaaagcggaacatgtgtaaatagttgtagaggaaagaaactgtcaaggaatactccgtaatgatacatggtattcatacccgaatatcaggtgaccgcatgtaagtacatactagctatgaagccttggcgctctattagggcttgcaactgaccgcatatcttttgatttattcatagtggcaatgagtttcatctagagagactgataaagtatgagcgacaagtagaaaattacggttccaggccagttcgtactaacgcacactctcatttctcaaatctccatgctttcaaaaagaaatggaacagttttaggtatcaaacaagcatcttgctccatgttataataaatttaaaattttaatagtcatcatcgatctctcaggatctttaggggttatcaacttcggcacctcgatgctttgggcatttatcgttagctcctcgatggccttgcgacaatggcgctatttgctgtggaaacgcctgcgtaggccagcggagcaaccatcaacttctgtagagcacactgttgggtcaacctggctgcggtgcggtagtagtcatgatcaaatactttccagatggcaggtggggattccgattttcctcactgcaatagttacatattattagttggtttacttagaatgttgtagtcatagaagactcggtctaaattttcaggctttgtgagtcaggacatgggcccagggggatcgacctggatcctcgaaacaagattcaagacaagattcaagatttcatcgttatattaagttagaaaatatctagggtgcacatttatggctaaatctcaaaagaagggagctctgagcctggaagcgccactagttgcggtggttgaagtagcctcagaggcagcccgagccggtgtggtggatgtcatcgagttcatcgatgcagtcggcgttgagggtgttgaatcggccattttggtgctaattgggctggttgaagatgaaacatcaacgacatcggtctttgtcgaacttgcgctcgtgctagcggagcttgcatcacttccgccatcgccgcattgaaccacagtctcccatccaccggcaaaggtttcctcccagtacgatgattggttaccaagaacaaagtagctgaagaaatatccagagccaagttgcttgtgtgcgttttggtagaacttgattgcacactcgttgctacatgggaagtcttctctggcccaatcgtcactggcgggataagtcaagaagcagtaatcagacctgcgagaatatcaacatatgcatataccgtaaggaaaccacaatgtatcgaactcacccacttttggcacaagcttggccgtatttgtactggaaaacctcgcccactgtggcaacgggagcctcgtaaatcaaattattgccgctggcaagtccagctaggtcgccatccttgctgcacgcagcattaacattcttgatgtactgcgacaatgaactactgcatgtcgcggtgcacatagcttccaaatcggaaggttgcgggtcaaagtcaggatccatagacgccacgatcttgagtagagtttcatcgcagttgatactggcgctgtaggcgtctttgcaggcctgtgatgttgtctttgccaagtccttggttgtatagtcccaactaggaccggcagtatcgagactgaaggtagcagtcgcctgacccaaagcagcggcaaacgcgaagaggcataacatgatgctggtggggtatcgttttgttaagaattccaaagagcaataaaaacagatgaaaggtgagaaatgaggtgcgtctccggcgacagaaagaatagactccgtgcgaaagtgaactggggtgttcgcagcctataaatacccagaattttcaacacttcaacagctattagcgaacttagttaactatggagctgctattacaaaagtagatagccccaaattttcaggggcgattccgaaatttaagccgcaagacccacagcgaaaagatcggatggggccatagatgaggccaaactgatgtttttgatgtttttttgagctgtgcaggactaagaatacgtatcacttctaggatatacagtattcccaggtgtgcacggtgaagtaggtaaactcgctgtcgattcggtctcatgtcacgtaatggcggaaattaaaatctccacatcgagatgcttagttagtctcattttcttaccaatcagatgtcctcgattccatcccttcctctatcgcagcgatttgattgatcatccgaaactgcctgacagtagtgctgcagcctaggggactggcactgatcagaacagtggaaagacagcatctgggaccgggtacgtcgggtccgttaataggcagcccttgtccagctttttagaagtatcgaaatctgtccaaggaagaatatgaaacgcctttttattagagaacatgagtttccagtggctgtaaagacagagagattattgcaaggaaatgatattactataattttttattcagagttattcagagtacgttgaagagaatatgctgtctacataactatgacgaaatatataagtgaagggcgggcgcccaatccatgctgaattgattttgcttagcaaaagcccagctaggtctcatgggctgttctccagatatctttatcactcagcttcagcttacaaattaacggaggcttctcccataataagtaagaacgctgtttgtcccattccccgcttttctcatgaaatttcaagtcaaagctccaaagaacccgtgcaagaatcactcgtgactcgctatatgctagttctctcccgatgcagttccttggtcccactgagaacggctggaggatgtctcgattgtcgttgtagaaaggcgaggataggtcatctctggcatcctctagccaacgctcgggcataaacttgtctggagcataaaagttcatgggtgactgatatgcggcatattgatggaccgatactttcgtctgctaaacatcagccattgttcggtggaaagaaaacaggaatatcaattgaattacggtgcttacatttcggggcacgacgtagcccgaaatattggttggtccaggcccaagcgttatccgctgctgtccagagggcgctggtggataaattcgcaatgcctccttgagacatgcgagcatgtatggcagatttgcggtgcttgagattgtgatatgcttctcggtcttcatagcagatcttatttcacgagtgagtttttccatggcgtgtggcgttcgcagcagccagtaagtaattccagaaagtaaagtagctgtcgtctcgctgccaccaatgaccaagacgttagagttcgcttctaactcctcctcggtaatctcgttgtttgaatctccgcgttgccgcagcatgctgtcaatgaaatctgtgcattctctgtcaccctgaaattggagacgtttctggatagtggctctgctaaattcgatttgtcttttccgtgcactcatcaggcttttcgaatcaacaaagagagacaatattctgaacaaaaacggataggcatctttgaagctcacaagggacatgcctcggattgcctgaaagatagttgatacccagtaatgatatttagaagattccaatcctccaaatggctcgccaaaggcgagatctccaagtatgtcgaaagtggtcaagttgtaccattttaccatatcggcttccggaatgggcgaggcggcaatgattctcaacttttcaatcaagagatccacatacttcgtgattatgggctcctgggattgcaggcctttcgcagaaaaggcatgtgccaaggacatgcgaagacgactatgatctgcatcgttggcgctaataatgtcggacggattactggttgaatgcagcacctttggtagttgtcgatggccatgaccatatatgtctttccatgcctgagcggtgatgaaagagacttcgtttgggccaaaacgaacgacttcaccgtatcttttgtgaaaatctcgcattttggtttccaatcgaccctgggaaagggcaataaaacgagtgataggaaaggcaacccatattttcggaccggggaggttgctaagtggatggaaatagagcgcccgaatgatatttaagaggaaaatgcagaaaaagagtatagcaaggaggaaaatggttgtcaacatgatttcgacggcttgttgccttcaggctcctggtattgttcacaataacagaagactcaagaaaagaagaatatatatttgtgtcctaaagttcgagatacaggatatatcaatatatatggataactaaggtcatctttatttcaacctctataacaaattgccatacgattgatagaaccctcttggtatgttgtgcagaacggagccgcctggcatcggatccgacgatcatcggagccgcaggaaccgcattgaccaatgaaagtacgtgactccacctatgtcttcggcttaattctcatccaagccctatatcctacagaaataaatatacaacatttctgggagtatcgcctatactctgaaatgtccactctaccgacgctcgtcttcatacctggcgcctggcataaacctacatgctacaacaaggtcatcaagctcctccaagaccagcataagttgaaatgcatctccataactctgccttcgacgacgggaaacccagctgcaaccttcaaagatgatcttgatgctgcacgtgaagctattttgtccgagacagtccacggtcgcaatgtcgtcgtcgttgcgcactcctatggcggcatggttggcaatagtgccgtcaagggtctcacgcagccagacttcaccgaaacccaaaatcaaatctcgacaacgggctatgttattggcctaattctcatagcctctggatttaccctaagtggacttgccttcatggatccgtttttcggccatccccctccatcctggcgggtcaacaatgagaccggatatgccgaacttgtcacttctccgcgtgagctcttctatcacgacttgccagcagacgaggcagaattctgggcttcgcaacttactacgcaaagcctcaaagcactgttcgagggcggggaatacacatacgccggttggagagatgtacctgtttggtatattggcaccgtcgaggaccgaggtttgccggtagtggtacaacgcataaatattggcatggcaaaggaaattggtggcagggtggagcatagggagcttcaaacgagtcattcgccctttctgagtcaaccagaaatgacggtcatgatcatgctagaggctgttgaggcgtttacggggaagctaggggtaaatcaagctacagaaaatggcctttgcgatgcgatagtagcgccgagggccatgatcacgcagcctttcacatggttcagctttggactcccgctggttattggtcatatattaggaaggtgtatacttgtatttacttgggggaagagattctggaggtctacttaggtagaatcaattaatgtatttttggtatcagctcaacggatgttcaacaaaaagttcaaggctttctgttaggttttgatatacccgttagaagtagcgatggtgacaaaatgataacaagatggaaagttcattgaatactacctcttccgacgatctattgaaaacggtccaggggatatctaccgcttgttataacgcagttcttcggcataaaagacattgtcagattaagcggaccatagaactatcagcaattggaatcattgctagcgggtattgcctacattatgcctatttaagaattgaagctgtatctaggacacctgtgcatcccccaagcctcttttaagctctcacccgtgcgggtgtcgggaggcttttgttgggctctttgaagaaggaggagtcgaaaaagttcatttctcgtatggacccatcgggcatattctctgccatagagaactttgacattatggccgatgagagttccctagggacttcggggtgatatttgagcacctgaatatccacttgtgactacgtagtcgtgtgatatgccaggaattcaccctttgactgtgccgccaagctgatttcgttcatgtctatacaaagatacctaggcactacatgtatttcctcaatcaaactcgtatttgtgaatgtaatagttatcttataaggaatgttacgcgtaccgaaagaaagaaataatctagtatgcttccatatcataaaaaaagtaaatgaacagttctaacagttctagcagtcaatagaaattaacattggaagaggaaagtactgactaccttgtgtattgtaatagtcgaccgtaatatatcaactagcatcattggtctagtggtagaattcgtcgttgccatcgacgaggcccgtgttcgattcacggatgatgcactataatttttttattttttatacaaaaataagtacacctcaccgttcgtagaagcatcctaagctggacaatatgtagctcaatgaagcgaaagctgttcaagattttacttgacagtttggtggttgggtttttggaaaacacagaccaattagatacttcccgttttagagggatggatccttattaggattagcccactgtgacagtagtgaaatcgctgtaacaatagtgctctccgacttgatatattacaataatcctcggtggattttttcgaatagagatgagcctacagaatatgagactcgaggaactctcctgatttaatgcctttctacctaagtttggacaatctgcccggcttcaagtggatgggcccaggctttctatctatctctacttaggctagcgacatcttcctgactttgacactctgcggtgcatttgaaggcgatcatgttgcctttccgagagagatcagcctcttgtggtattctcagctccccgttaagccttggtcacatatcccagccctgtggagcaacttttctcgattttgcccgcggggttcctccgtccccgggggctaggtcagtcattccctccctgagaagacttgtcctctgcggtatcaccttctgtcaagctcgaggggcttcgggtcctcggattcggagggggacagggacaatgcacggtgcaatcgattgcgaaagcgcagtcgtcgatcagcggagggaaattttggaatggcactcataattgcatgtaggtacactgagatgacaagcgaccatatggcgagcacactcagcctttatgcagagtcggtacaggaaaccagaagtgagcgctctgccagctcgcaaccgggtgttgcaagcttcactgtcttccacctggccctgccgcaattgtcgctaaatatgaatatgtttcaaccactcaggcacacagcggtcaccaacttagtgtggcccgcccaataaatgatatgcgctagggctttggcagaagaagtctcttgtactgatcaaggcaatttcgagaatgactgtaccatccgaagcatactgacgtattttgaggagccgcctgtcaacaaagaatctgcgcgccatagtgttggcggatttgatgctttcaactattccatgctagaaaaatgacggatccgtcaaattctgaaatattgatgggtccaagtgatcaaagctgaaattgtcgtcatccaaaaaaccgaggccaacgtcgaaggctgtaggagtgcacattatttcctcatgcctccaagcctcggcatcactgtcgccgccattattgcttagatctgtcgacatgttgcccagaatggtctcacaatcattcaggctttcgagcgcagcattttccatagcctgttcgaccggtaaaccatcaagcatagcctcagctcgagccgttgctatcctcagaaacaaataccctttcacatttgtttctccttggcacatccggtcctttgcatacctaacaacccgatgagcatctttaagtaatggctcttgtcgggcgcgatttcttctcttggccagaattgaaatatccgactcatgacttttgtgcaattccaggtatatcatcaatgcaccacgtgtgatgatgtcccgaaacataccacccccattgaccagcaaccggctatagagatcataatcgaggagcgatatcaaatccagggcaacctcaagacaaactttatgtgagtgtgcatagagtgggtttcgtgtcgcctgtatcgcgtagttgaagtgaagacaaagaagaaaccgattcaggagatgactacaaaagctatatgcaaattggcttcccaacgatatatgctcctcagagagattgtgagagatctcaaccgcagctttgcgacagatcgaagccagctcatttccaaggtctaaaaccaaatgatacgagggttcttcctgtaagctgttgatgaccctggtggccctaagtctgagagagaaagaactggccaacacgcacagaagcggctgccgagtcgagctcgtagctatagtttcccggtcttcgctcactgcagaatctaggtcggcatcttctattccagatggcggcatagtgttgtaatcgctctcggtaatcatcggggccatccccgagtccaatgccgcctgaagattcatctcaaggatggtataccataatcttctccgaatctctttttgtcggaagtccatatcacccagatagttgggatcctgatgtaggcccatctgcatggccatcctcattagtgatcccgcggagacccagactaagtctgctcctattcggtttacctggcgggaaaggagtaataagcaatatatctgaatgccttttaatgtcaagcggtctttctccaacggtgcggagagccatgtttgggcaatattgatccaagaaatactcttttcggccaactcacggcgagtttcaccatgactgtgcaacggaccagcggcggaaattatgagaaggagctccacaacgaaggagctctttgcgctttccggatgatcgatatagcgttcatagtccgcctggaacgaagagcgatgaagaatgcggtagcatgactcaaatgttgcaaagtacagttgaacgagatcgtctatgacttgacgttcggggaatgagcggtgaatttcagcgggaaggctctgtctgtttgggcgctgcttcttgatttcccgggccagttctttacattttgccatcttctgcgacataagcccccggttcgcatcgatcggttgttgaaacagcgtagtctgatatgccatgactggccctagaatggacaattcggtggccttgggtgggctgtcaacaaggggccgaccatacggaacaggaagagaccatcacttaccaggcgctttgtactcatccaatggccctgtccaaaaactcgagtcttagattgggtgccatggattcggccagacggagcaggggtaggtggggagatattgctagagggggatccgtcaggtattatcgacgttctgtgttcctgctgcttggtggcttgactttcgcgcaaattatggtcggatgtgatgcgtcggttatctgtaaacgtgcatgacggggcgttatgcgcgacacactggctgcaagggttggctcggtcgcatcggaccttgcgacggcgacactcgacgcaagaatgagccgggcgccggcgttttcggatgccactttctggacttttcgttgacaattgcattttgcagatgctattggtcccacttctactggtatttttcgtgtataagttaggataagaactcgcgaactcggtgaactgcgcgtagtgaagtggctcggtgctaaatctataatccgatatctccgacgccaagacttaggtggggccctggcttagaactagccaattgtagtagatagaaggcatcggtatacagaagggtgggagatctgtagtaggggaaacagggcttacatttagaatcaggagagaaatcactcattgacattgcatatgaagatgtttcgaaagctgcataaagatgacatttgcaattctctcgctccatgcagcttcagtgatcttcacataccgactagctctaattcataccccatgtggctcgggaaacaatgtcctatcgaattgcgtagaaacaagaggtgcgctagacacaagtacttttagcttatcatgggcgagggaatgccctgtgatgctatccacttcagtgaaataatcctcggccgtaaggctagaatttaccgatgaggccgatagagccgattacgcccgccggtcgactacaatgataattactggcagggtaccttctcggttgatagcgtagaatataaataatcagctagttattttcatcagtaccagatcataagttatcttctctgatttaaccacctgcaatcttgcagccgcagcagcaaggaaatacccccccccgatgtttctccagtacgtaaatgcgtctttccctctcttttttttacaaattccttcaagggctgctgaaacagctagatgcatatggcatcctcgctcggcttcagaaaatgtaccccttcatgcaggcagtcacttacacattatcagggcgtcgaaacgcaacctgagcagtagacgcctcccagctctgcaatcaacaacaatgcccctcaacgtcctcatcgtgggtgccggcgtctgcggcccagctctcgcaattcttctccaaaggtctaattccaaacacaacatcacggtcgtcgagcgttctccctctttgcggtcgataggacagcaaattgacctgaagactcaagctcctcatatattgagaaagatgggcctcctggatgaagtcaagtcacgctgtgtgaacgagactggttttgaaatggtggattccacgggaaagcaaattgctttgtttggtgctgctgcctccggtcaacgtcgtcccgggttgacaagcgagcacgagatcatgcgtggtgatttggtgcgagtgctatatgatgccagtatcaagcaagatgcagagctaaagcatgagtcgggaaatgggaagggagtgacatatgtattcgacaaaacgatcacagccctcgacgagaccacggaaggtgtcgatgtcactttctctggtgggcagaaaaaacgatatgacctcgttgttgctgccgacggacaaggttcgcgcaccagacgtctcgcctttgggcaggaggttagcgatgcagctttcaagtccctcggcgtccacgctgcctactacagcatcccacgaattgaaggcgaaggatctctcgcaaggggccacttggctccgggaagaagaatgatgataaccagaacgagtgatcgtccagtcaccggggtgttactcttcaccatgaaagaatcgtccaggctaaaagcatcttaccagaagtcgttagaggaacagaaagaagcttttgccgagatgttcagggatgccgactggcagactgatcgattgctcactggattgaaggcttctgaggacttttatgccaatgaggttggacaaatcaagatggaacagctgtctgctggccgagtcgttctccttggagatgcgggttactgccccagtccttttacgggcttgggaaccaatctttgccttgttggggcgtatgtccttgcaggagaattggcgcggcggggcaatgacatcgctggggcactcaaatcttatgaagagaagatgcgaccctttataaatgattgtcagcgattctcatctacaaccttcggcttcttctttccatcttcgcagctcggagtttggtctatgcaaagagtgatgtgggcagtgtctaaaatcaatgacatctttccccattcccaacaagacgactattggaaaaatatcccggagtatcccgaattgaatctcgcatcttgattgtatcttccacgtcagggatatgtcgatgtatttctaatctttttgtcttcattcttactgccctgcaatatatgcactcattcatatgttgcttaaccacctgctcaagatctgccatgttgaatttggtcgcccattccctgtcaatcgtgaactgggtcattccatcctagacccgaccattgcgaaggcttcaattagaacctggttttgacgcaataaattgtaaagcattaagttcatatcttacagttacgatattgaaggcctctatggcagaaaacaggtcaatggtcgttacagagattcattccagatcagtagatctataccggtccacgttgacgatgatgaacccgcatttaggggctaaatgcattcttagccgggggttatgtgatgatccaggaaggaacgtacttgctgaactgacactcgcacttgccgcacctacactctcgctccttccacaagtagcattgggaataagcgagaagaactcgacttttgcatcttttgcaaatttgaaaaggggaggaacggccgcacagatagtttctcttttcctttcttctcctgtacttagaatttggatgaaattgcactcttttcctctggatagatctggcatgtaacagatactatctaccatctagcattgaaatgcagtttttagaattaaattatctctcttattggtagtggtagaattaatatgaatagctttatgtttaacagatcaggttatcagatcattgtactttcggagaggagattttggtttcttgaagtggtcggaggcaaagacaattttcattgactgcattcagcaggaattcattcaatgtacgattccgaggtatctgattccggtaagcaaagactggcttttattgacaaattccccgcgaatttggagcaggttcaatggctcagttgccattgggaatgcattacatcatgtcaaatactttcaaatgaccgagaatttctaacttcgaatcaggtgtggatcatcaattattgcggagcttgttgacactcagatattgacaggtaggttttgtgcggtagagtaggtatgttcgccgacttgcgtaattttctctcctggcgggatactggctctcaaatcaagagtgatataataactcaatctctagctcacgatacattaacttgctttatcgtacaggtggcccgaatgccaacgcagtaaaaggtacctaatatgcagccgataatgccatgccatccatgcattttcatcataccaagaacccggacatttacacctccatccattctttctcgttctcgtcggcaatactctcccggtatggatgtttctcaatccattcctctgcaccgacaactgtcgcagacttctcatagaactcgctaagcacctcgttcagctctataaatcattaatactcgtccaatccattcccgtgtcttgttttaagactcactttcaatttccatcgggcttgaaggttgcagtgaaaagcgagacgcgccttctctccatagtaccagcgcggacgggatgggagtacctaaaattataagctttcaaacaagattgaacatggaaaacagcatacctcgtgggacgcagataacagtggggtccaaacgacatttcccgtcggtgacttcttcctggtaccgctcaaaatcaaagcgtagcatttgctgcataagacgagagttcggcatgaagaccggcccattggagtctaataggtagatggtaagactctattgcacaagtgctagacaggagtttacagacaggggcttgacttcgcgatagtcgcgtgaaccaacccatccttagacacgctgactgcatccttcctgtggcgggtctcgtcctgggtcacatcatatagtgtggccttgcgatttagctggtatctatacatggtcgcggggaatgaagcatgggtggaaaggagggagaattttcgcgcttggttgatgttcagccgggcagctggtagccagtgagtggcgagcatggttgctagagtgtgttgcaaggtaatggatgttaagttaaaggggcgaaattcttaagtggtgtgtgtggtgtgcggttaaattaacctccagatatcgcggaaattggaccgcggatggggaaaggaacacgggtccatgacatgacgcaatacttacatatgacgtcgaggtttaagaggatctttctgcaggtgagctctacgtagcccgatatatttctataaaacatctatctgaatatctataaactctcgcatgaaaagatccgaaatattaacatgggatgcgaattgcttcacacgcttctgtagatttggaacttctagaaataacgcgccgtattgtaatgaaagtcacatgatcgggaatgcagtaatttactacgaacatccgacactcaacgattacatacttgttccaggagataattctaccatttgaatttcgatatcctccgtggaattgcttttgaactacggagtactccgcatatatctcaagtctctccacagctcattcacccataacccattcccgcacaagccgctattttatgattctcttccacttcaagtttgatacatacgaccatagggtgtggaaaacagggcttcccgtccgctcagccgtacttannnnnnnnnnnnnnnnnnnnnnnnnnnnnnnnnnnnnnnnnnnnnnnnnnnnnnnnnnnnnnnnnnnnnnnnnnnnnnnnnnnnnnnnnnnnnnnnnnnnnnnnnnnnnnnnnnnnnnnnnnnnnnnnnnnnnnnnncgccggtgagttagtagttgggtgggtgaccaccagcgaatcctcactgttgtatgtttttggctttgtttttgccacataatctattttctttacacggcgattctcaatatgcccttgacatctgagcggcactcgagggtgagcgcggggtgatgggtgagaagtctagggactagggtgagagaagcgggaatattgtgatgacgaccgtgccacaactctcaaaatgctttatagtctcctcggcgacagttttgcgcagagggtatgtactgcccatggtcgcggctgcaacgcaaaaaaagagagcaggcccttggtccctgaggcgcgcggctgtcttgtcgtgtgcaatatatatgaaaaggaacttgggcaccaagtcaagatggaatgtcgtaaccaagcgttcagcctcggcgtcacttaaaagctctcactggatcgaggccattggacgggtcactagcagcatctagcagtgcggcaatgtccgtcgagttcagttcggaatcacgagaccaacccgggtcgttggcgagcggattgggctgcccattatgtcgggtcaaatcagccagctgtgatgccagctggtcaaccttctgacaattggcactgtggagattgaatctggtaacagatcaagaggtcgtcaatacggataatattattgtagccaatggaaaaaataattctagtgcaggagaacatcacgatgtcaagttttcaattcttggatgccaacagtgtgcgttcgtgagatgatacttcaagtcatccgtgatatgaaatatggtctgatcgatatgttctttaagctagttggtcaactgcacgagatgaagcgacagggattgcccctccttctcaccacctccagccatgttctccaaattcgacatcctttgccatggtaggaaggtattcatcgtctttcggggagtctaggaccaggaaaaacatcacgaagtaggagtccttccatttcatctctggggggatacgggcagcgcttctgaaaccggagattttactatacgttattagcttgagatcataagagatatagtcgaacatacacagcacctgtcttcatatcgagtatgatctttgacggggacgccggaaccggttgatatccaacctttagaacgtccctaattctagttagcggcaagtacatgataatcaacccactgagtaacaaacatataggcctttcggaggtttgcacggacgacatctcgtttcccgcgggagagattccagaacttctgaatatcaagaggatcccctgcgaccttttcccatacaaggtagaggatatacccgccggggacaaggtcggtttcttcctgcgtgctggcatgatatccaaggagtttaggggtagtagtaaagttattcgctgtgaaatactttaaggcagatagctccacgtagtcgcgtgatttccaggcctgtgccttccgatcgtccgagctatcaagttcagtaccagataggggaacctgtttgtagatacgcatgaaggcgatatcctcggtacctgaacggcgacaaagatattttcccgcgacatatgccggatgcatgccaatgttgaaatccttctgggtaaccggaactgatgcctcactcaacttttctaatatgcgccagcggctagtgggatagagagtagcgcattgtttatccgaagggttcgggcatgctgtagtgatcaattcgttgatcatcttgggaagaactggacgagcttcgatttcaggcatcgtgagcttggaaaagagagatggtgtcaagaggctaggagaagaaatggcgatgcggcagtattatactttcacttctggggaaaagaagaagagggtagtaaacattaacccgtggactagttggtcgccatacgtcatgtgatccaaacacccgacgaggtattgtgacaccattgtgcataattggatagttgtatgggagatagagaccgagattgaaactacctataagacacatcgtgaatgcattctgcgcattaatttcaaattcacattaattcgttcaaggttaacctttttttccgtattttcccgtatttttctcatgtctacctagaagataactatacaaaaaagcacattaaaagactaccatcaagccaactgggtcatatgacaggctgcaaaagtggccgactatccttgtgttcgtgaatcaaaaagcaggaaacctaaaaccatacagcatagggcagcaagaaagaggttaagtgtagttagggccattttgaatttacgtgaaaggtactatctgcggttcatctcaaaccaaaagaggacctccagctagataaaaactagctgcagaatgcccccacgatcatatcatgtagcggataagtcattcattatagtaggtagtagggtggctgaaggcgtatgttctgggattgggtgcttcaatgtcactaatcatggtgaccatcacgccggtgaatattgataacgaggttagtactagttgttatttagttttcctcggcagataaaacagttattgttgagactgataggacctgctccctaccttgtttggtcttccttctctctctcttagcgagcacacacaatacaacacattgttctctttctcatcagttatccgggtcgtgtagcagttgtagtatctcgtctaggtgacaggggtaacctaggagccactgtttgtttgtagaatcctagaggtataatacccaatggtcaatgatatggttaatgatatgagtgttaaaggtgcctatagctactgcctgatttcccttcaacttctctttccattccgccttgctcttcttctctgactcttttaatacgccgagctcttaagcctccccttccttccattgtttccctcattcagctatctgcgcatgacgaagctttttttgcactctagattgccataatctaccattttcactttcaattttcttctcatctcagatgtgagtcttactcaagagccatttgattagtatactaataagaatccccttttagtaccatctcaacatgaaatctcccacgattacaacgcaggaggcagtcgaaagttgtctccctgaccttctcaaggctactcacaaaaccttatcatccgcaatacacaaagtcaaatatattggcccgctatctcaatggcaggacttcgaggaagatgtcaagaataacaaccccaaacgttggacctcggctgttattgattatcgtatcagcaaccgcgatcttcggcaagaggaagtctatgttgccgacgagacaggtgttcaaggaaggttccaacaggctgtaggtcaagttctcggagctgtctttagggcggaaaagaagaatctccgctttggggactttaagtctgctggcattacctacgacaaaaccccggatattgctatggtgtctcccggatccccagtcatgcttcgagctgtcggcgagctcaaagtcccctgggtcatggctcacaacctgaggaaacggtacggcgccgatcaagaactgcgtttagcacttggacaagtgctcgaatatatgattgacctacgacttccttatggatttcattctacctatgaagaaaccatctttttgaggcacgtccaggttaacggacagtggagggtcgaatactcacccgtgattcagagcacggcgactgatgtttcactaaagaagtgtttttggcacctatcatcgctggcactccaagggaatcctgttcaaaaccccgctttgaaggatgacttggtcactgacgaaattctttgatttagtcctataagccaattctgcttaatcctctttcttccttgctcctttgtctctctatgcttggtatcttattgaaatgcactctttgggaactatgagctttctctcaggatattgttgaaagtaaagttgctaaagattgaccagtaattcaagtttcacctgattttcctatgtcgttgaccctgtcaggtgccaagggacctcacaagtcttggcttttggtcggcccgtgggatccgggccgagggtggacctcaaccctggaaagccctgcatgtgtgcatacgtggggcttcggcttccttgagtcggacttcttatcgcagggcaaaggaattaaagggggattatgaagattgcgacgttcacaccgcggataagctttggccgttgcagcacgttcggaggacaaggacaagactggctatgtatacgataacgagcctcaatgtccccgtagatacctccgttcaacgaatcatttggacaagggatttggttgaagaacatccgagggtttggccccacttcctgagctaaataaggaaaggcttgatgcttcgctcgcttcccaggctgaaacattttcaaatcccagattcccacgaaattcttgtctttaacacagcaccggccaataaatctggtcccttggctactcccggcagctgcagttaccccgaggacaatgaggttcaaaggtgccgggcatatggccatagtggcgttgcgcattctactgtttacaaatcaagtcttggcgctcaacctggatgttaacaatcagcgtaagataactatgttttcatatctttctaacggttgagttgctaattacatatattttcaatgagtagaatccatcaaagatgccgggagcaccgccgcctacaacatgatgacatggtacaaagaaaatgggacagataacccgggtttcatctcaagatcttggtggacaggagctgctttgtttctagcatgtctcaattattggcatgctacaaacgacacaacctacaacgatgaagtcagcatcggattacaacatcaggggggttctggcggagactacatgccttcatgggcagtaggcatagtaagtgtctctctcaagatatgtagtcaaagtgctaaccgttgcatagggaaatgatgatcaaatgttctggggcctcgcggcgatcaccgcagcagaatataaattcccgaatcgtccaagtggggacacctggctcacccttgcagagggcgttttcaatgaccagatatcgccagaagggaagggatgggagacgactatttgtggaggtggccttcgctggcagaaggagatatggcaaagtggttataccatgaagaacgcggtgtcgaacggtggctttttcatgctcgcggctcgtctcgcttggtatacccaaaagaacaactacgccacgtgggctgcgaaagtctacgactggtctacgacggtgaatttggtcaataataaaacctgggcagtggcagatagtgtcagagcaggctctgggggtcccaatggctgcagtcttcctgaccacaccgagtggacctacaactatggtacctatatatctggtgctggctatatgtatgcctacgtaagtatttttatcccccaccctttagtaaatcagaactacactcctgtcttggcatgctaataacaaacctcgttgtagacaaacgatactaaatggcttaatatcacaaacaacctagtggattcattgtttactacatttttcctacctcaacacggaggtgtgattacagactgggagtgcgaagcttcggacgaatgctacaaagatgcgaatggtccacttttcaaaggccttactgtgtcgtggcttgcagatgttgcattgatcgtccctttcctcagggagaagatcctacccaaactccaagtttctgcccagggtgctgcaaattcatgcaccggcaacaaccaaaacctctgtggtaaccgctggtacggcgggtatgatgggcaaaattcaatggagaatgcaatgagtggtagtcagataatgagtgctgttatgctgcaatttctaggcacatcctcaaaaccagtctcgacagcaacaggagggaacggcacaagcgacccgagtgctggtactggggaaaggtcggggcctgcaccgttgtcgcctatcacaacggcagatagagcaggagcaggaatcctgacagtgcttttcgtggctcttatgttaggcggagtggtctttttgtttatggacccctgatcctcctgggatgatattctagcaactaatcaagaagcgaagcttacgggccgacttatatttcaagttctcacaataaattttttctttccgtgatctattgacgccggacagttaagaaatatcgagataaatgatcacgggatcgagtagacggcagtgagaaacttatatttcccgagaaagtatctatattctacagtctactataaaatataccaactactacatactagatatttatgtatcagttcaactggttgaattcaagcccggaggctgacgaagattttggaaatattcacattcgccggtcggagcggatacaaaacttccccagacttcttctcctcctcgaatgttgtcgtgtgaaactgcgcgatgatagttcccctgaacggcgccggtggtttcgaccacaccttttccacaaccttggaaacactctcgatttggataccccggaacccttcagtcgccgagcgtctcatcatttcttccgccaacatcctcataagcccacggccggaataagattggacggtgttggtagcgttgcgcatcagtacctgtccgcgaccagtaggcctccacgatgcaggatcccgctggtctcgctcctcgagggcgtggtatagtgtttcgaacatgggcagtgttgctatcagaggctttatctgaaccatgtctagatcgtcgatgccatcgtaagccatagcaattgagactagtgggaagtccatctactctgcaaggtccctttccgttgcactttcatcatccagattccagtacagcttgccccccgtggctgcagacgcgggtcgcttgtattggtattctttgtcgaagataccaagtgacttccctgagtcaatctggtgttttattaaatagtacgaagtctaaaggtttgataggctcgctgggtgttgttctcgggatagacgaccggccacaacggggagtggaatatatttatatgaatgcaaattgcccgggcccattcctcatgttctggcccaagaaggcgaatttcgtactgcggcgccagagatagggtcattttgatcaaattaccaagctgagaatacgtgcatcagatgtgggaaagaggggctattaatacccgggtttctagctgcagtgtaaccattgtcatttcagtacagggagctagctaggtagctacgtgttacaggtatctgatgcgtgggatagtgccccaaattgcttcccgggtaccattgacttggcctgtgtttcctatgacacagcatggactcctcgcacgttattttgacgagttggattctctgtagaaaatatgggaatcggcttttgatgcaagggattactatcgctcgctacaagaagggaccagtcctaacctcatccaaattaggaatgtagaatgtatagcgacggaaaaataaacgcctataatgcactataccttgaaaacatcatggtccttcggtggcccatcaccacatccattaatatcacatatcccatatcccatatatatctccttcactcttcctcgttcacaagttcgccctgaactctccgttccggacgcggaccagcatttcatatctgcgtctcggtactcaacacccggttgaataaaacgcagagtagaatgcaccaatgttggacaaagcagtccactctctctaggagcaaggactagcaaaagccagaacaataaagcgtaaagaaaaagtgcagaaacggcccaccaactctccggctcaggagtcaacaccagtgtcgacaataagcacccgaagcacgttcattgtgcacacctcttcgaatggaaaaaaagaacaggaaacaacacaccaaacccctccaaaattatcatggcgcagccatatacccgttctcactctcgctttcactctcatttccccccaagtcactcaagtcccgactccgatggccagaatcagaccaccgcctcgcaccaggcaagacagcagatatactgcctgttgagtgcttttcacaagtataaccaaccaggacagtcttttcctgtacttcatgaccgcgctgtccataagcagagcatgggtcgatcgagtgctcgaagtagaggcatttgcaaacggagtaacgttcgacgactttgtaacacatttcgcgtatggtatattggatgggatttggggtgggttgaggttggatgatgactgtggttgttctgggttgtttttgagagccgaaagagaagaagaagcgaaccagccgattgaatgaatagaagaaaaatataacagaaaataaagcggacaagtatagaaagataggctggcggaagaatgacccgaaaggaaatccgagggagtgactgggttgaaagactgaggggggtatatagaggaactgggggttatatatttagcgagtatagacctgatatattcacacataatgcaataacatataaaataatataaaataacatacaaaaccatatcccgagggtcagccctatgggatgtagccccaggcagaaaccaacggggcgcgcccaatcggctaataaggaggaggaattgggaattgttactccactacgtagacaggtactggctatggacgcgggtctacctgtgtctgcataggtcgggtttagcaacgtatccattttacccctctatgctgtacatagcgggtgactatggaggatagtgggggtgcgatacacaataaaagaccagtccagtcctatcccctcagctggaatgttcacactctgactccgtaaatctcactatcgcgacacggaaatagtaaccgcagcagtcaaggatctacaagtgtggcagggaagcgaaagacggtggacacatagggaagataaccccgcgacggagtcggtgagccacaaggctgcgcagccgcataacagcgagcaaatagaattgacactggatgaggaatcagagatcgcgatatgactggctgcgtggcgtcgatcataaatccaatgtgcccaggtggacatccgggcgttttgagtcagagcctcttgacacagccaccccgtcacaggtctaggagtgtggcttaggtatagagccgccgttgaccgcatatcgatgactaggtctctatacgattagttacactctattctattacaaactgtcgcattcaaacggtgacattttgtagcgtgtagattaggcgcccgcattcagctgctgacgctaacacgaacacgaacagagttgacggagtacggagtaccgaggggaattcgcgagaaccggttttttttagctcgacgctaatcaccacggacacgttgcatgatatacctcgtgggttatccgtcagaggccgtagggctgagggcccgagcccccgagcccacttgccgttttgggtcggaggtccaggagattgtgttgttttacgtgatatcgtagattatatcgtagatacgctcatatagagaaggtactggctcaagaatcaagtcgcatggttctgatatcgtacagcgcctgtcataaagacaaagtccctgaagtagatgtgtgtgtgtgcaaatgtgctaagctaaattgatttcccggattaaaaaacacccattttcaaaactaggcctccctcttactctaactccgtaatttcagattgatcccattgcgccgtgactcaacccgcgtgctaatcccagccgaagcatctggaggatatccccgcccttggcggtctcgggaagcccggcgcgccaatcccatccgcgatcggcgctggctttgtcacctggcgtagacactaggacaccggagctgcccacggagggagggtgagatcctgagcccgagcgtgcccgcgctgactcgagcatgtcgttgccaatgaaagcaaagctggaggcggagaaattggacacggacttcttcaatagcgcgcggggggaggggggtccatctaatcctccacgcattgacgattggtactcaagtagggtggaccggaaacattcctcgcactgtgcgtagacacggggggtgacggtttccaggtcctcgattgcggacaggatggtgaactgttgggatacggacaggattgcggtgggttctggcgccagattagtatcggggaagaaggttgacggggttaacttggaagacttacggttcacaaatgcacaggcttcacccagcagagccagcagtccatccacctgcacggcggagtcacggtccgggtcgtagagacctccgtaaatattatccgccgcactcccaatgacagccgcaagagcttgtgcagcggcgcgtcgccgagccaaaggcttatagcgtggtcgctggccctcttgcagttcaaattcctcatcgcggatctcatagaaccggcgcaacgtcgcgtaaccactgaggtagaactggagaatccgagcagcttcttcatcgatttgtgcaatggatgacaggcacgctttgggttccttcatcaaagagcgcagttgttcatcgagatcggtcgtcgcagggtacgcgcgtgattgaaccagactataggaaatcaataggtcgacaactgatttgaccttgcgtcggctctgggcacgagcatagcagacgagggctagaccgaaattttcggattttgaggtcaacatgtcgccgaatcgctgtcaataagttagcagttggtcagtcaaaaggagttcccttctatcactcacctcagatacccgacgtccttgatcctccagctcaagttccgagcagagaaccactagtttatctaactgctcagggctttccaaaggaagcttatccacgatctcggtcacggcctgcttcatctggttcgcatcgtccatgcggctcaatacctcaatagccagctcccagccttcacgggaactgtgctcatcctcaataacggttcgatcatacagtccgaatgcgtaactgcgaagaatatcgtccttgcgcaaatggcgggccggagacttgttatcctgcccgtacgaaagaaccatgagatcattttcagacagcccaggaatcgtcttttggctgcttgcggactcaaaccaacctcctaggctggcaacttcggccacagctgcggccacgcaaagtgaccatgactgtaccaactctaacacgccctgcacatttccttcgaagacagatgcgagaccgacttccacgctgctgagcggattgggtcggaaatcagcggtgtcggacccatcgctggtggtgtgactgagggctagttcgaggcggtcgagataggcgccacgcatgttgcgatcaacagcgcgaacgtggttctttgggccacgcgagcgcaggaaatctgggaagttgtcgctagcgccaaaatccatgttggaaccggtgtcatcctcgccatcccaccatgctgtcaatgcaatagtcgcctccacccagtcttgagacttggccttgatggcagatgggtcgcccagaataattcggtagatagatctcaagctctggtaaattgaccatgggacacggctctctgccatgcgagccgattgagcaaatgagattgggttcttattggcagtatttgagttgaaagtggacaagccaaagttaacagcctggaagcgattctctggaaccggcataatcgattcatctcgctcctctccctcagcgaattcctccagatcagtgacagccgaaagaactcgtttccggtactgagaccaatcaagaccggtgacttcccagtcttcagcttgggttccaggacatgattcaagaatttgaagagctttgttaacgcaacgctggatgttttgcagctgtgcgccacggtagccaggctgtggaagtccatcctccattgctgatcgggcgtagttgaagtctgcggaacggagaacacctgcggcatcagtcaagcgaccacgcagcacggaagcaatgataatatcccagaagttcgaggatgcggtcgggttcggttccacatatttcaatgcttggagctccttggtctgcgatacgtggttgtcactgagccagtcaagcaaaacctgaggtagaggcttagggacgggaagtctcgtcatggctttcaccatgccaggcgccccggtgcgcatgggattgatgtgggcagtcgatgctgcttcacgagaagggtggtggatttggagcagcaatgaagccaagaaggtagcttttgcaaggtcggaagcttggtccccgggcccaataccagaatgggcaacgtatggccggtcaatcccactttcgtccgcgcaagtctgccaattatctgtcaactcctttgataccttcgccaatacagcatcgaaatcgacatgcttgaattccgcggctttgagctcgtcggaaagttttcccagggcgtcctccgttttgagaatcatctcacttggctctttaacaggggcaatgcgggatctggtagcaatattgtgaagaattgatggcatcgcggacggcttcttgggggccaggttggtcttgcggaggggagactggtgcgcccagtgctcgtcaagcttcggtcgcttggcatcgtttggattcgaatagatctgtttgcgctgcgcacccatggagggctgagacccgaaagggtttccgaaggccgagtctaagaagttgaagtttttggactgatcctgggcgttcatgttcatttccttttcaattgtctcttctgcctctggttccatcccgtcttcctgctcttcatggaagtcactcatttgcgacgatgcaaacccattggaatgtccgaaatccagcgaatccccaaatccgccgttcggcacaccgaaacgaagactagagttgcccctgagcctagcggaaggggctttggtctgcttgggcatggcataatccgtcgatccaaatgatgatccaaagatgctgtcatttgtattgatgttaccggatttggtaaagaccgagttggagaagtcatttctcgagaaggagttctggtttgtggagaatgcgccatcgtttcgggagaaggagttgatgcgcgagccaccgttgatgttggatgtagaatgaggtatgaatgagcctgcggtcgatggcggcgggccagcaggagttgtcgacaaattgctccagagactgcgagagctatctttctctggagtctcaggtggactggactcgtatggtacttggaatgacatcgcggggtcgggttgatcagaatgagaagagacgggtcgacggcatcagaggatgcaagttttgggtcacaacagctctaagaactgttagatggaacaaacgacgataacaatcgacaaaaattgattctggaggcaatgaagaaggtcggcgcagttgattgtttgtcagaggagttccctcttctcgggacttgcttgtttttttttctcgcccttcactttctgcttcgacgcgacggcggaagttatgaggcatcaaggcatctatatttagatcaggtgattttactcgaagttaggtcacgtgaggtgcttactcagaccaaagcatgccatcacgtggctgtcggtcaccaacttggggcgataacatgattggcttattgctgagctctgattaggcagggatcagcaagtcaggtacgaagccacatctgatgcatctgattttgccccgggggttcgacgagcgacacttcatgaactcaagcttgcaaagatggatcccaatcatgcttagttcgaacaagaccaagcctttaattgatcagagaatctaggtgtataattaacacgctaaactcaggttcttggaaactagtcacatttccacggagtactccgtacggtaacactctcgactttcaagtgtctcaactttcaagtgtctcaactttcgagtgtctcaactttgaagtgtctcaggcgtctccggttcatcaaatccacatttatcgtgtgtccagccgccgagtatctcagtacccacagcttctagcgccacaactacaatctcagacaaactaaacaccttcatggcgctaactgctccttcacacttggaaagccggatattactttccaccgtaccccgactccagagggcccgtcgtgggaatgtggaagttccgacccttctccttaaactgtacgatccgtcttgggaccccgaacgatccaacaaatggatcgagaatacctgcacaaacaaggcttttcggagtatatattgatcccgcatgcagttcgacgacgggaggaagctgatttttgcctggcaaccaacactcgcttggcagcgaatatgaaaactagtcgagtagaccagactatagtgacggcttttgttctagcggcatctcttccaaaacaagcagcaatttgactatctatgcaaactaaggctgcggttctacctcatggcgctcatctcgggaattagcttttttgagaaggtcagctgtgcgaaacagagctcggcgggggtggggcgggcgttgcaggtgcggagaatcaggttgttcggacaagtttgaggtttaattgacggccccgtggcgttctggatattacataattacggatttacgaaaatcccggacggttcattttagtgttatttacctattatacccttgagcaactgctatattctctcacatttgtttaatttgttttcacgatagattgtactttgtacaaagtaggccaaatcaaatgttccaaatgcccgaagccaagcgaggcagtgcaagctgagacaatgtttcagattagacaagcctttttcgatggtttgatcgacagggttcggttactaagggatatcccgaggttcctcccgatgatatcgaatcctgttgcctacccccgaagaaaccaaccctaaaaacaacccgagagacctagagcctcatttttttctttctctcaagctatggccaatccaaaaattgcatgactatggcgttccgacgaccacatcggaaatctcgccacggctgcatggaatgcaagagacgccgagtcaaggtgagaaagaaaagagaagggcaaaaaatagtatactcatcccatcacagtgcgacgaaacccggccaatatgcaccaactgcaccaagcgtcattctgaatgtgagtacgggtcgtcaacctccctactgtgggcaaatgaagaccccacggcaccatctctcgggtccgacagcggacagtctggcgacccagtacggggactccgttcatcgttgagtccaagtgcaggagcgggaacagcagactccttcggagtcctaggccagcacggcagtgaaaatgccgcgatctcagcgggatccccactgaacctcaacgacctggagctgatgatgcagtggtgcaacacgacattccggacactgtcacgcaacgagcacaccgacccaatctggcgctacatcgtacccgaagaggcgctcttacatccattcctaatgcatggcatcctggccctgtcatcgctacatctcgctcgaacagggccggagctgacccgtcgcgcgtcatatctcaaccgtgctgtcgcgcaccagaaccaggcgctggcgctgtttcgggagctactgggcgacgtgaaggagagtaatgccaaggcgatgtttgcttttgcgggaattgtggttatctacacgtttgcattcccgcatacaccagacgtgcaggatccgtggtcctgcgtcgatgatttgtaccaggttctcgttttggcgcgcggcgtgcagcaggttatttatgcgccccgggactttaccagttttctagaggacagttccttcggtccgattttacaggccgaggagactcagggttcgatccccgaggacacgactgctatgctcaaacaactgcgtgaggctaatgaagtctgcggggcgcgggataaaaatcatgacgtgcaggtttataaagggtccattgcgaatctggaggaaatgcttagttggtgctacagcgggatgagggcaagtacgattgctgggaggtgggtgatccgcttgcatcctcggttcatggagttgctacgcgaacgagaccccttcgcgctagttatgctagcgcactatggcgtgcttttacaatatttgaagcatcgttggtgctttgacgagtggtgtgtcagggtctccaaggccgtgtgggcaatattggacgatcagtggaggccgctgatccagtgggcaatgaaagagattcttggtgttaactttccgcaacaggttggcacttgacattttgaagcatttttttgttactttcatattcatattcgtatacccaagttcaaagcgccgaaaccgcgagagaaatcccaccaatccaaaagaaaaacaatttggatctccacctgaatatctccacaattatcgcaacaaatcccgattctaacccattaaacgatgcttgagccttccatggccttcaacccacttataactatcacaactcttttcatcccacgaagatgattcacctcgctagggtgaatgatcacgaaaatgacgcaagcatcaacaattcatcaatgacataaattaaaggggaaatttttatgataaaaccatgcgtgcccagagcatattctacgacatgaatgacgaatcgcatgagagaacgatactggacgagtggatgaagcttacgccggtgaccattcttcccgcacctttgggagtgagcattgagaaagtcaattgatctgaaccaatcatgaaggagagacatgaggggaataagcataccagaagcctacctcgccgcgataaatatatccagctaacccaaattagggcaagctgctccccttggccataaaaataatccgggcctattccatgtagatactagctgaacagggtggcaataggcagcgatgtgatctgcgtaatatagcatggtacctacagtatccgccgactaacgggatcaagaattgtgttctcgtgcggaacaaatgaaatgtgtgcattagagcgataattgcaaagcggactaggagggatgctaatcctgaatttctccttagatctgcaacgagcaccaagcagtccttggaaacgcaaattcgtgttaggaaaggcgaattcgtatactccgtactccggtatccacttcggataagagttaagctttgtggcgttccgtatcaggactagcgggtatccactcgtctcatatgtatcgggacagcaatccgaagccctagagggatacctagcctgcagatctcgtgtgggtacggagtaaaatgtctcaattctttcatctaggaccataacctacaacttcgcctgctcactcttattttgcagcacataccgatatctcgcctttccctcatgcatatcaactagcgcctgattaacatccaccatatccctcttctgaatccaaggtaaaacccttttcttcgcagccagagtcagcatagcccgaatatcatcaggagaaccaatattggacccagtaaccttgacactcttctggataagactccaagccataagcggcggcaacgcatcctccggcgccccaatctgcacaaaagtcccatcccgcttaagcagtctcaaatactgcgcgaagggcatatcatgcgccgacaccgtacacaagataagatcaagcgagcgcgaatatttcttcgcccaccccttctcctcacccgtagcaataaacccatcagccccaaggccaccaacagcatccgccttcttccccgacgatcgcgaaatagcaacaacacgatccgccccaagcgccctagcaaacaaaatccccagatgtcccagccccccaaccccaacaatccccaccgtcttcccaggcccaaccccatacttcctcatcggcgcgaacacagtaacacccgcacacagcaacggcgccgcctcggccgagggcagagaatccggaatccggaatacgaaatgcgcaggcccgcgccacctctctgcaaacccgccatacgacttcgacttgtcgctgtagcgtccgttgtacgtgcctgtcatgcgggcgcagtagctttcttccccgtcagcgcaggcatcgcagtctgcgcgtagacaggcgccgctctgtgcgccgacgccgacgcggtcgcccagacggatcgcgttcgggcccgattgggatgagacggcgctgccgaggcgtgtgactgtgccgattatctcgtggccgacgacgcaggggtagtcagttggaccccagcctgagcgtagagtgtggacgtcgctgccgcagatgccgcagtgggatatagaaatttcgacgtcggtgggtgtgaagggcttgggggtgtaggttgtgtatgttagggggcttttggcgtcatgggcgacccagcctttgaaggtgtcttgatctgtaggaggggacattgtttggtggtagttgcgttgtggagaggtgtcgaggtaggtgttgtgctgaattttgatacgtttgatgtatgcgaaattagagttccagaatttatgaggttgaaggaaacaagctgatgcggagaagccgaagaaaaagttaccgaggtccatcttaactccgaagtagagatacattattaaattcatatcgattgtagcgattatgcgaaagttactccatatttacatgcactcgctcaaaatgtgtacaatgcagactagtgggggtatcaattgatctttcagcgagccacgcccatcagatcttcaagctcatcagtagtgagagtactccgacgccggttcgctggcctggaagccttttcaggtcggcttctctttcgtgattcgcgctccttttgctcatttttagctgcgcgggcctcgtcttcgacggcagccagtttttggtgcacgcttggtggttcgttggctttgggctgtagggcgaatcagtgctcggggtctcattgggaatcttatgggaatatcctgggaaatagttctcgttgcatacctgctggggttcctttgtctcgatctttcgcctggttggcctgcgggtcacagtatcggctttgtaagctttgatgttgagggtatcgtcgtcggtattatccacacatggtgagccgtgtaaacctggcgtgaatgagacctttcggggacgctttgtcatggtattttcactgcgttccctcagaacgcgatcgggtcgctcgggtgctttgcgaatcttagatcccatcttcagaggattgagcctctcaggctctggtgctttctcctccgcttcgctcatatcttcctcctcagcttggtcctccaggattgtcgggataggattggactctgccaagctttgcatgctcatgtcctcggttgagttaatgctgagatcgagattcatgccgcgcttcaattcgtccgcttggacagaatctcctccatctgcaagacgtcgctgccacccacccatcatggtaactgcctgcttccaccgggattccatcttcacccagccttcccgcagtcgtttaatttcctcgtctctcacctcgacctcctcaagaggcacgaatgaggggttggtaagcagcgtttgtagatgctctagcactgcttccatgtgaccggatagttcttcacacgaggttggaagcgaagtaaccggtcctgaagaagacttctgcgctcctccgctcatcgccatacccaattgctcattctcgccattgccattgtcagtctccgtcaagccctgtagatccttcaaagtatgaacagtgttccgcgcaagctcaatcagggtatcgttctcatcactgaggtgttgacataactcggtcaagaagtcggtggtctcttgcttcaagctatatccagggtcatgtactcgttctccgccactagccagaagacgcgatcgatctgaggcagggttgatattgatcgtagtcacactcagaccctcacgcttgcctctttgtctctcagccagatgcgacttaagcttctgcatttccagatctcgcttgcgaatatcgtttgcgcattgcgctcgaacttgttggacggtactcttcatgcgctggacttgttccttgaaacttcggatgttcgcttcggcccgggacatgttggacttgagcgtgcgctcctgtgcctctgccagagctagcgagcgggtcaactcggatgtcttcgtttttagttttccctgtaggagcagcaaaggttagcgcgctatgctacagaagtagagtggagacatacgatctccgtggtctgctccgcctcgctggcttgcaacgtgcgaatagtcgcagataagctctcgcggtgttcggactcgcgctagtatttgtcagtcgcggatgaaggcgcagctcagtgcaatacacgcacgtctcgtctcaacactaaatcgttgaccaaattgatcacacgagccatggtgccgtctatccctccatcttcgtgttctgggtcagcaaaatcgatggcacgaccacctttcagcaagccccttgctagcaggatgttgttgacataggtcgaagctgcctgcaggttatgcgactccatggcagcgatcacttctattgtcgatgcagataactccgaatgccgaatggggaagaaagtaaacacgtaaatacgggaggctgtttgtgccaagtgtgcagctacttatgcggtgaggaaggaggtgtgattctgccagttcatcgtggaattgtatcgcgacgcgtcaagacttccaatttcattggatatttcctcaagtattccgataaagaggtaatccaattggacataaccatttatcgaaagtctgaagaggcagccctcaatccaggagcaattgaatgatatgctaatggtagtatcgtgccatctttattacatgacgcgtgggtataggccattgtccaatctccatgtcctatttgtcccttgcgtggcattaaactcgctcctaccccactacttaatcctcaccaaccgcctttgcatctgctcttcaacatggcttcaaggtcaggtacgcgtatggtacgcggagtaatatcaaaaaagaagcctgacatagagcaagccgctgctcttcaacgtgccggccaaaatgcatacaaagttggtgatctccaaggcgccattgagtccttcacccaggtatgccctaccttgtttgttccgtcgcgactcctactaatttatcatccatacatctaggcatgggtggcaaataacgaggatactagtatcctggataatcgtgccgccacctattgcaagctaaagcagtacagccaagcccgcgctgatgcgagagcaatggtcaagcttgcaccgaatgacgaccgtgtatctatccaccacagcgcttatttatcaactgtggattcatggctgactttgggaaaagggatacctgcgattggccaagatactatgcctagatgggaactttgacaaggcccgtgacatctacgaatatgccctccagaaacttccaaccgatcaccctggccgcaaggtatgcttttctttcttcactttttgttctactcagccctggaggtttactcctttagttatatctcattgacatcttcccccaccgtatcatgtcccactctttctttaccgttattaaccatctccaggccatcgagcagttacttagaagactgcaggataagctggcaggagggaaccggcgcgacccatttatggtcctgccactagaaatcgcagaactcacacttcagcgcttgcctttcaaacagattgtgtaagtgtacatccttacctctgaaatccactagctcattacggcatatagggcaatgctacgtgtctgcaaaggatggaaccgttttctgagcggtctagccagcttatggatgcatcttgacctcactggagctagacttcgtgtaccttggacatccgtccgaaactacatccatcgatcgcgcgcgcaactgactaatgccacgatcacaaatatcccaccctctactatgactaaggtgcttgatatgctaagcagatgcccccaattagagcacttggaggtggcggttccccatgaccagcctaaacagttttactcgaaaatccaagattttcgacatctcaagagtatcgtctgtggggcagacatcaggctttcgcatgcaagtgttgggggcattctatctaccctctcgaaacttgagagagctgcttttttgcatgtttgggatcattctaacagaggaccccagacatggccccagcatcttccaaatatgaaaagtctgactattgcatcttcacaagaaaataatcaatttttgagcttccgggatgtacttccggggttgggattggtaggcattctctgaatttaatatctgggacttccgctgacataaatcagtctgtgtatcccaatctagaggaattgcggctggtctgggatcccgcgcgatcacaatcataccggtttgatccggtgaaggaggaagaacaacttcccccgctccgcatacttgatcttcggggcgcggcggtccaacataatttctattcaatccttccaaccagccttgagactctacggttgttttcagggtccatcgaggcttctcatcttggtgggaatctgttgacaccgggagagaatgaactcccgaatctaaagaccttggtattcaatgataccccatgggtcaaccgctccaccctttccttattcctactccattcgaaggctcccctccgaactcttcacgtcaacctttgccacaacatcaaaagcgaagaactccttaatgtgctcaacgattccaacggagcgaatccagaattgaaagaattgactgacgtcggagttgcctgcatggcgggcatggacgataccagtgtcaaaagtctgtgggtaacattgccaaacctgaaaatcctcgacttgtcgcagacgagaattaccggctgtaccattcgcatgtttgcggatacctggactgaaggaccagccaccgcaaagctcgaaggcttaattataaaaggatgtgacgatgtgtctcgggatgcaattgactatggacggcaaatgggactcaagattgtcacttaggggcttggcagcgctctaaggatacttatcttagggcttttggtagacaattgtctaatgcactacccttgtaaaatgatcagaaataaccaaagatacctgcgcttgtatgaaaatgatgaatgatatgaatataaacttgctctcagaacttggaggtggagatagtgtcgagaggctaggggatcagagggcaaatgcatgggaaaataagaagagagaaacaagctggcagtcctggaaaacacatcatgtgatagcagcatacggtggcatatgtatgtacgcatgctaggtcttcaaacaaatcaaagagtgcatcaattcaaactaactaagacggagagaaagaagaagcaagtgcagaagtgggagagtgcctgcctatataactggcacttctgcaaacgtcgcaaacaacaaacgttttgaaagaataaaggaaacagcaaacgtgaggcaagcaagtaaaaaaataagcatgtgatgctatagaggatcgtaacacgcataatggccgggtaataataccaagggtacctgaaatccagaactaagaaaaccatctaaaccccacgttcctgacaccaccgctcaacctctttggccaacttctccttttgatcacgcacaagctccatcatgggctcaacctgcttcctgtgcgaggcaacaagatcctcactaccattgagagtaactacaccatccttcggcgcaagattctcgtcatagattttgaccataagctccataacagctgaaagctggtttggaagccactaaaaccccaaagcaatcagcatgatgatactcataagtcagagaaatcggacttgactcacggttacaataggactaccaccagtagcggtaggatgcggtgtgcgacgaataatatactcacgcgcgaacaaccagtgtcgccagcggaaactgcggatgtggttgagtgtgcgcaggaagaggactgcggtctcggagtcttgaatggcgtagttttggacgccgatttcttcggacttttcgcggatgtaggttaggaattcgcggtgtgggagagggcgataggcgcggaattcgtggaggattttggtgaggggtgtttcgggcatgggaatttcgcagagatgatctaggagggggatctggggttgtattagttgggttattcttttttccctctcttgggttccattggattgcttacgatgctatcatttgcaccgctctcaccgcggaagtagaggggcttgttgccttcacatccttcgtagatcacgccattcgggaacatggattggttggtgatgccgaagatgaagacgcggaaggagaggtattctgatggcttggaattgccccacatgtctatttcgatgtcagtttggaagatctggggatgtgtttcgtatggttagggttgcataccttccatggacgcttcgattttctccatcgactttaggatctcgcggaatccgtcgttgatatcctgtcgggagccatgctgctcaagattatccacaatctttaagacaccggcaatcagtgggccagtctccttgaccatgtcgacatgagtcaggatgaagcctgcttcggagctcttgggatcgagacccctctcgaaagaccgaatcagacgaaggttcgagtactcgctcagacccttggcagggtcggcaaaggtatagttgaatagagcatatgaagcagcatatgacatgaaaggtggcaggttcaggctatggataattgttagttccagtgttgtatgacgaagatatatcaaaataatccacgagatagggcagtaagaaaagaaagataagaagaaagaagacttacatctcagcacagcgatacataggacgggcaatagactggggcaatacatcgcgaccaagtccatagccacctgctgggtctttgttccagtgctcccagcaaggttcgagcaggtaagacgaagccaggaaggtatagtcacggaagaccgcagcaatagtgaagcgatcaggcgaaccatcagcgacaacgagcttctcgacctcgtcagtcaaatcagtaagctcagccttgacagcagggccgagctcataggtagccaacaggccgggcttgccatcgagcctaacgacagggaggcgattgactagagacagcagggcaccgaaggcctctggcagctcaacaggggcagtctcatagggcaagaagcctgtcttggtggtgatggtgaaggggtccagggagtgggagatggacgaagggtcatcatggatgtgagggaaccgcctcagggtagttggggaagggtagggcacttgggttcgagtcatgatgatatgagatgaaccagagaaaggagaagactagaaggctatgatatatgggtgtagtaacaaagggtgttttggggtagtatagggaagggtgtagatatataagccaaaggacaaaggagaaggcccaaagaccaagtcaagagcctaggtagtgggtgaaatgggtaaaaaaagtcggggaagaagctagaagacctcgagagatgaaaagagaattggaactttgagattttgggcgggcgaggagcagattcttataatactttgaggccggtaacaattccggcctcaagccctcattacgaaagagaatagaagatagcgtggacctggtgacatcaggtgcaacatgatgaaaattggttctatctatcctaaataacactcgagacagttcatatgagtatttttagccagaataagatattttcacatccatctcgacatccagatgaactatacaattacccagttagagagggcagaggacggtcacggggtggcgctagtcccgatacagcaggggctctaacagccggtttgactgctttacctgggatttaacggagatttgtgatgggaaattccaaataaggtgtttaaaaagtctataaaaaagatattggccattcactgatgaattactacagatgaatggccaatgttgtctacttaagtcgtgatgtatactctatagtccatggactgccaagcggagatccccatatcccgctctctgattggacgataagcccagatttaacttccctagcgttcggaggccggaatactaccggcctccgagagtagccggcctcgttatatgtgccgggttgatttgatataggacaggctcataaattagtatgataccttgtggtgattcccgagataaagcgaagattgacttataaacagctccatctctctaaaaatcttattatcttgttatttgaggaagaagtcgcacttagtatatctctaaatatattagaaacaaacaaaagaacctatcgtacatttgcatcccaaaagtaccgaaagtacttgatctattcagtgactctctagtattatatatttattgtataccacgcgattagatatgaatgatctccgttgttgataatctcacgatccgtcgttcccttctataatcttcatacaaatgcacgctcagtcctattcaccaccaaagtccaagaattgtgatagaaagtcccatgcaactgcggcaaaaaatactgcaagaccgcatcccctacaccagctggcagcgacctcttgtcaccccaatagtgcctcaccaactccccgacacatcccgtagctgcgacccctgggcacccatttgcctctgcacaagataggactcgaatgtcctccgatctgttaaattcatacctgacgtggttcccaaatgcagattgctcatgtggccattctcggccccatttagcgcagtctggatagcgcgtttcagtgggacaatcgtcccacgcctcaaagagttcatgggtgcgagggctttgctgggcaataataaatccagtgttgagaaatgtccggccgttccaatcaaggttgtgaggtgcttctggatcgagcgccatggcaaccagagtctccggagtgatctcccagtagttgaatagccattccatgggtagattggggtacggcatcatggcgtctgaatccatgaatacaacgtattcgtagtgttccaacgcttctttgatggcggtgactttgatccatgttccacttcgcccgactgctctggggatctgaactagtcggtaatcgtagccatggatcattgctatgctagtcaatcacaccgtaggaacagatagaagtgtgactacttaccgaacatgtaatggttgagtcttccactgacatccggaggaagtccagtcgcgttcaatggaaccttgctcaaaagaccttgagggccatcaagatcccgactatcggcgtccaaaatgaggatcttctttcctaatggttcggtgaaccttaatggctccgcaacccagaaggctttccctgtgcggccaataaatatggttctagtaatggggtgtatgtagggattgtatagtttgcggaccgtggaggagtataagtggctttcgacggtccataggaagtgcttcctatactagagtcagtcctcaacttcaacattttgctttgcgtgggctcgtactgggacggctgatcgattaatacactgttcaagtaggagtataccaaaagcagcgcacacacgatcagactcgaagtaaaaatagcggttattcggcgaggaaacatgagtcctgaccttggacgaggcatggggatggtacatttccggagtttccgatctgtagatttgacatagtatggatggaagtcgattgaaatgacataatttcgatgaagtaggacttatctcacccaattcatccatttgagtcctcacctcttgccgctttttgcttggagggactaagcacgcctttttctgatctggtccttattttcgtactatgccattgaacaaaaagttctccgaatatatttccagggttccgacgctgctttttctgaattctaatttttttgaccaaatttgccgtctctttagttcgcagttccatttaaacggtagaaatcgatgaaagtacagcgcagctcctaatcccttagttgtccaagcgaaggtcccatttgaatcagacataatgtctccataccccttcgtgataccgtatggtccgtatcggaaccttggaaaccgggccgaaattgcggggggtcaagtggtatatcatattcctaaggctttccgtcttttttttctcagtttcctcatgtccgcagaatcatccaaatgttgcgtcgcatgtggttggacgctcgagcagcaagaaaattgcgcttattcgagccaccttaaactcttttatggcgccggcaagcggggaacatggtcgattgggtctgatgttattttgaaagaacgccccgatgaaggtccaaaaaccgaagtgaccaccttgaagcaccttgcagcctaccccgatatcccggttccaaagatattgcgtgactgggtcgacggcaacgggcagtactttgtacttctagagcggatccaaggtcaaacgctcgaacaggcctggtcttcgttatcagatacccagaaaatagccatcgcagatgaatgtattggaattcgaaagcagttacgattagtcagcacctatagaaaatgttgatcaaactccttgttttccgggcctactgttttttgacagtgagccgcatggacctttccactctgacatcgagctttgggatgccccaagtcttactctacacgatccacctacaaggtcgttccctcaacgagccctagcaaatctgaaggaacggctgcccaaatgtgaaccctacgtcctcacccattgtgatctcaatttgggcaatattatggtgaaagacggaaggctggctgggatactcgattgggaatttgctgcatattacccaatttggtatgagtacgtttcagcctcttgggggtggacagaggaggatgcccagtggaaaaagcttttacgagagcgtatggctgtacatggcgatgaacatgaggatgcgaaggaattctggacggatttgcatcatttgagaaaatacccagatttggacgaaaaaaggccaagaagttttagaaaggttgtctgcggattaacgacaatgtataggaaaacgaaggtccggggggattaagccggcaagagaatttactaaaatcgatctagatttcaaaccatcctatccaatgagacgacctttcaaacaagctcatacaagtatacctcccacatcccatgaggatcttcaaaaaaagttatgtcatcccgatcaagccattaagatcctggagcagctgttgtaccagctccatattatctgatttctcacgcaatgccttcttgagtgcaccggctgcctccttggtatttccaggcactacctcctcagactgcagtttcttctctgcagacttgatactttccttcgcacttcgaatctgagaccaatacactgaggtcttgttgagatatccagtctcctcaagaggcaagttccacttttcaggagtcatttcgacaacatccaaccatttggccatgtgcggccatcggcgctcctccagacccgggaagtgcacgagcagatcccctcttttgccttcataggcccagtcccattcataggtattgatccacggtcgtggcagataggagactccatctgcgtaaccctgtccacttggaccccccgtcgttttgttgagcacacgtctcatgctttcttggtcagcagatcgaccaaggtcaatctgagggagataaagagggtagcccaatgtttcggtaaggaaactgatcatccagggatggacgtggaggaacataatccccgtgttgaggccgttttggtcctggcttgccactaggtggatatctttcaggtcggacggcgggaggaagatttccacggggatgtcattgttcagtataatcgagtctgcgtctacccacctgcgcgaattagcattctcaagcatatacaaagaaagaaaggacatacatcaaccactccattctctcgccggctggcttggtcaattcattgacaaccaaggatagcagatagctcggtttgttccaaaatccgatcgagatatcctgccgcaggatatgcatggggtatccccattgcttcccatggcgttcatggctttgtagcgctctttcgtacatatggttcgtctctccgtatagcatggacactttggcgaccctttgcaacttgttactgggagcattttccgactcgagaatagaaaaggaattgactgaattggctgtgacccaaacaacacatgttactgatagaattatcaggacgatgtgcaagggtcgttgtttgaatgccagttggtgtggaatcatagccgtcatcaccgcgtaggtgctaggcttgttcctcattgtgggtgtgggtgggaagatgaaaaataaatgcttccttgaggttcagccgggaccattgccagattcggaattgaatgcttgattggaggctcgtgagttgtatgaattcgtacttccggattgggaattccgttttcggtaactcaggtacaccccgtctataccgacgaataatgtccaattaatttagtttataaatagatatcgatccaatcatttgaagacaaagctcgcttattctaggacgcatggaaatgcgctgtgttgcgtacggatacttacggtccactgcccacatggtgcgtatgaagcccacaaaggtgtgccggtgtatattgatgataagaagcgatgtcgccgatctcatgagaacattcctgcgactgaccgcagcacctgatagattacataagaacatttaagcgtctaactaactagttagactacatggcaccggagtattgtagaccataatcacaacagaacgttcgattattgtcgctacagcggtgtatatattacaggccttaaggtccgttcgagattataagagaaccaagatcgcttggaaactacagcattaactacaagataccgtccagacgacgcccaaactggtagagagacgatttcatgttatatgatacagatgagggtatattatacaccacattttcaaatatttgtacaacagcgcatattcatacaactttaactccacgttcccatgcatcagcgacctggccgtcattggattcattgtatagcccgagcgcatccagtccgaatcgcagactagatcccgcaaacgaacgcagcacaatatacacagtcatatctacactatgaccctggactcgtgttctgactagttgtttttgagtcgccggtggtgctgtgtaccgtctggagcttgagatactcctgttcgagggccttttgcatttcaaagtcggcctggcgttctagtcggacacgctgcttttccatatcacgttcgactcctctgtgcatagcctagcatccaacaacgtaagtatataccagaaacagggaagagaagctgtaacataccgctctatccgcctcttgtgcccagtggacaaaccagacaatacccattgtgccgaggccagtggctgccaatgtaaactttgatgcgcgagacattgcaggatatgtgagagcacggctcgacgcagagattcggctggtaatggtcacaaacaatgttttggcctgtcagatgttcatcaaaacgattccgggattatcagatcaccgggcggcgtttggtggcagaacccccaccgctctggggggcgatgcgtggctccgatcgacctaggctcggagctacagactcgccgtttaatcgtccctgtcctgccttatttcccttctaccctatttccaaagctgagaggtttctagcaaatatggtgagcaatctgtctcagaattggtggccagctgctaacggtgaacaacagtcggctcagaactccgcgggcattcagaccctcctcgatgtaggtcttcgttgtatgttgagcgcatcgtggagatactaaccatgggactgctaggccgagagagaggcccagaagattgtgcagaaaggtaagtgtcttacccctcatcgctgcctatcacaaacactaatacgtcacgttacatttagccagagagtgtacgcaatacaaacttacctgtcgtcattcgcaccatcgaactaatgatttcgcaactctacagaccgtacccagcgtataagggatgccaagtcagaggcccagaaggagatcgaagaatacaagaagcagaaggaagaggagtacaagaagttcgagaccgaggtgagatacaattcctaaatggcggtcataacaagaggcatccacagtgctaatttgactggtctcactagcactcaagcggatacaaggtagccgaggccgaggccgacaaggaaggcgaggtcaagctccaggagatcaaggaagccggcaaaaagcacggcgagaaagtggtcgcaaatctcattcgtgtgacgaccgacgtcaagcccgaggtgcctgagaatatcaaggcataatgtagatactctcggttatcttttctttcgtcgcgtgaatgcgcttgcgtgtctgttcatcgatatccaattgtcggacaatatcaatttctttttggcttaaccctgtgtatgatgtggatggattctggatcgctcgttttggaatacgcatgtcgtattcctatcccatggtgtccctgaaattttggcttgactctaggcttttcggttgacagcacgtctaggtttcaccacaacacagagagctatgcctaggcaaacagctcaccagtatactaagccatacaacacaccttgatattcgtatctgtattacgggacggcaacaagaggcgcagggtgactcaatgcgctgtccaaacgtctggacaggtatcagcactcatccctgttgaatggatccttgagcgacgagttactgctggtaacacattctggcactagtggcactgttggttttaaggagtgtctgtcccaatatcagaatagtgtataattagcgtttgagatttgtctcttaggccttgaaatgtttgattatattctgaattattccggcgcgaaaagaggcctatcctaatgaatcaagccctgaatttctagctgataacacatatctttctctttacataggtacatatataggctacgctcttggtggaagaacacactggtgaatagtattaaacagtgggaaatggcgggtgggaagccgaagtaggaagtaggtgtcgaccagaaatgaacccattagaccccctaatatcaccttggtttttgttatgcggacacttcgatccggcagatcagtaactcagtaacttcgcttaacttcagggtgagtacggtcttgtacagtcttcgaatagatcgatccttacatctctagttgatttctataaatctggcatccatacgtagctagtaaatagtgatgatttcaaattttaaatttaatcaatacaatatctctttgtagttgaaagatcattaagagtaaattaaaagtattccgatcaaacattgatctatattaattgaaccatggacgaggctgttgattttatagagagagtatctaagtactgaccaataacgtattttactaccgagtgggccaccactagcgagtaggccacccatccaaaacgcgtcgattaatttaaacccttcttcttctgtcagaatctaggatgaataccgtcatttttcatccctgatacaattgggtcacgtgactgaccaggctggttttccgcccgaaaaacatcctttcattttgttttgtttgtttgattactaagttgtccatcagattgtcatgttttccggactattgtcatttttagagagttagagaattgattgagatttttctgccacatatacattcgccttaccaccgtttttccgtcaggttcatatataggtcaatgccgttatagttatccaaccatcacttgcgtaataaggccatatccctagggctgaccgtaagagggctcaggtgatcaacaagacgtccaacgagactacattagtatatgaagagcgatatcatttaaaatagcagtgatattaggcgatttttaggatctactacgcaacacagaacaagcgcttttcgacacgcctctccactatattgacatagtatccgaacaacattggcgtcgaggccatcctattgagttttgcattccattccaagtgacagcctgtgtcgggatttaatttttccatttctacgctctggcggaacttagtgggccttgggaacgaatgagcatgctgaaccacgaatgcttttgctcgcagtgtgcagcaatcctatcccacacctggaggctctcttcccgacgcgcgcaccttcctccaaggtaaccgaattactaccttactacccaccctgtgattttgaaaccttatcccctcctacttttcttgctgtatcttcacagtttctctctctctcaatttccgcagaacctgtgacgaatcttatgtggtgatgtttgatgcctgtgttgatgcctgctgccgcaggcatcctttatgtatttagatcgtctctcattctctcacacactctctctgctgttgcggccaacctgcagaagcaaacacgacttttccgtatgttaatttgccttatttgaattaccgatacattccctcctgaacaaccccccgccccgccccttcccccctaagaccaaatccaaattccttttcaatatcctctcaaccacaaagccattctcagaaagcatctctcagagccccaccacaagaaccgccctgtatgaaaccgcgcacaacccacaccttcccgcccggcgcgaggaaccactgcatggtgcgcgcgaggttcttctgctgcgagcgaaactctccgctactatgatctgggtaaacgagcccttgtattgctgtgtgaaggagtcggtcagttcgcccttatgcgtgggggtgggcggagatcttggtgcttggtgctcggttgcagaggttgtagtccatgttgaacgctattgcgcctgagagggcgggcgaggggcggtctgttgccacgacggtggatgctttggctagggcgcagattagggaggggagagcggcgtctacattgtatcaagtgtgagcctgacgatcaaggattctggagggatttgtatactagtacgaaagatagtagtaactcatcagcgcccagctcaagcacactctcacccttgacactctacgtctcgtgaatcctctttccacgcattcgtcttaggactcatctgagtactggaatcggcatcttccacacctcggcgacaaccatcgtcgcgctgcaaagcagatgggcgaataacttccgccccacctccaacttattcagcccatctgtcttctccaacccggctgcagtctcctcggtgcgcttctaggcctggcctgggtaggttgggaccatgatttcgagatctccatagcgcggggacgagtagaggtgctgggcggtgccgctgtggaaaaagggcgcgtcatctggagggagatgtggaaggaaagcgccttgccttccaaggcacggtgggtgggagtgtcggcacacgtccgcagggacgatcatcattttagatcatctcaatcgaagctgcacttcatccattctcattctcaggtcacttgtttctctatagagcagtgtcaaaggaaaagcgagaagagtgacagccgggaaaagctcaaccgagttggcgacaatgattctgcaccccgcagggaacctggtctagcgccgagtctatcccctgttcagggctttgtgccacgactcgatgggttctagccaaaccatacggcttgcagcttaaactgtgacagattcccagaccgcgtatcgaagcaaagaccctagatcagtagtaccatcacgagctaagactgaaccagtcttaagttcctttaaacggtcaagagttttatcaatgacctcgcccatcccactcgcgtggaaaaatttcgcaagtcgatagtgatagtctaacaagaccgggtgtggaagacgggactctgactcaggctgggatgcatctacgaaagtgacctggtgggggaggaatgggttcatttcggtggggaagcgcttgaaggtgacgaagttgtacgtatgcggagcgttggcctaagtcgataattagtcctaaacgaacccttcactttccagggctagaacacagacgcacgatcggctcgaaggcacatcggaagcgaccgaatgcgcggtggatagaatggtgaagcgtgaggccattctcgatctcattgattctggaacttcgcatgattgtgcgtatctcagggaaacatcggtagagggtttcccacatattcgagatggtgcttgcacctttctgctctaattagtatgtagtcttcaacaagaaggctctaggaaaagtaccatggggtcgtagcttgcaaacgaccagggaatgatatgcgcagcttcgagatccccctgtagaacatcctccgccgaccctgtttcttccgccttgtcgaacgatatggcttttgtcaccacacaacgatctctatcacgttcgagacagcccttgcggaaatccgaatctcgcacttgcggctcctcaatcacctcatacacggcttgagcattctcacgtcttttttgatgcggtgagtcaacaggggcaggtgtttttccgccagacgctttaactatgcgaggtcagtcacatattcacgccaagtttgcatggacttactcggttggaggagacaagtgcgaatattctcataggtagccaggagcatctcgtcagattccgcatcgagaatatcgtgcgcgatagagtttcttcctcctggcggaagccagtcaagcagccccccaaagcagtcttgcagcttttcggattcctttgtgacctcgtatcgactgagtcgttcatgcgtgcgagctttaagatcattccagccatcttcggtcttctcgacctcagtctgagcgaagctaggctctgaacaaaatgtcccttgggacggagagattcgacgcggttggcgggggcgggttgaggagcggggcggtgggggtggagatgattcgtgcttgcgcttaggcattgttaggggttgcagaggacaaggatgtagtgtcaagaggtgttcgagggatagcaacactgcagttaagccttaaagactattaaatgcgttcgtgaaaagaagtcttctgcattgggccgttaggggcaagagctgtcccattggtctcaggagggcaaagcggtaaaaaagaaagcttggcagtatgacataaatagcaagcggtgtacccatatacttagaagacgggagcaatgagcagcttggagtctgattgcttctttgttttcccccacattctctgagccttctctaactagtcctcttgtattaatttaataagcgaaactcaacccgtcatagacagaatttatggcactttgatcctccgtacgcaaaacggtggttcacccctgatctcaaatctcagcaaaaggaggtaaactatacgcgacgcaaatggcaagagagctgcgcagagataaggcgactattaggcaactagatcacagtaatctttctaacgcgggttgagcaggagaattgttcacccgagccggcattgtcccattccctattttccaagcggtatacagaatatacgcccgccggtagacgatcggtagaagggcgcataaagcaatacaagggtataataaatattatgacaacgccaatcacactccatgttctatgaatacttttaccaggataagtttggatggtggtaacatcgccaatctcggtagatgagggcactgtgggtcggcttaccatcatgtcagtgtccatgcccattccttgaaagtatgaaaaacctactagtatagtggattccgagccatggccggctcatcattatcttgagtcagggagggggtttgtaattccacggtgggtgccatggcaggctcatcatcattttgagttggtaagggagtttggaattccatggttggtggacggatggtgagtggatggatgaacgaaggattgatgaatgaaggacggatgaaggaggattggagataggggcggagggtggaatataaagagaagaagggagaaggaagagggaaggaaggatggaagatggcaaacaaaaaggctcagagtacaaaatgactctatgtcacatgcgaggcttttgggatatctgttttccctttctagctactcttcttcaacatcataatccatcacattcatgcctcatcgcaatcagtatggcatccctgtcacttttcagacaaagagctaaccatgaggcattcagtcatggcattcgacgcttctactgcccctcgaccccttctgggcaaagatggagcagagcctggcttctgggctcatgctgcatacgagaacccctggccccgaggaagccgaaacagccatatgagtggctcagtactttatcaacttcaccaaaaccgtttgtatcgcgagccggctttacggccatcaaaagccaagtatgatggaacacgctttttaaaggcagtgggggacaagactgtgaatgtggaggctctgctggcacaggctaccggtccccagctgaaacctggggcagaatgtctgccttgccagaaacacagaggccctttcgtctcctgtgtcgttgtcccgggtattttcagcgaatgtgccaactgccattggtcacagcagtccgatcgatgcagcttcaacaccagccctcccatgtcatttgtccctcgacggaaggctgagcccacagtcatccccactggctttacagatacggatggggtgagaacaaaattgacggggagcttcgagaggcacgtcttgcgcgaggtaaggccatggcactttgttgaacgtctcaacaggcggattgatgagattctggaagcaaaggccgcccaggcatcacggcctgcaggtggagaggactaagggcctggaggtcttggaaactagcatgtgaaatagtgcttgtatgaactacatttctgacacaggctcgccatccagtacacatacgtactattttctctaaagttcggtatctaggccacgctctccaggaggaatggattggcagacaatcagagtaagcataacagtattaaaacgcagaagaatgataacaccctgatgcggtcccattactccgatccccgacactctaagaggcagagctactgtatcggggacgtttgacggccctccgacgagtgctcgccttgcttgtgcgtccagtggtcattggtgactgcgtagacgccgagtggataatttggaggaggatgcgaacgatctcctcgtcctggctgtcttccagaccccagtggaaggtcctcacggaccactttcgaatgtcagaccaatgaaacaacggttaacgtgaaggtcactttcttcttaccttgctgttcttactgatcttgtaaaagtggaactgtctgctgtcggtcacaatcccgtatacagtggtgtctttttttccgcgctcctttcgtccggagtgcacgacacctagaagctggtcagcaatgcctttggcgtggtgcaatagacttacccatataggcaaggacttgtttctgccctttgccaatttcgtccgaggtcttcgtctctacaatcaccaggttggtctccagatcctcatgctccccataccatagcgtatagtcggggcggccattcagcctgtgcttgagcttcattcggccgagtcgggtaatatgcgagaatgaggcctcgtagctccatctcaccggatgtgccaccgcaataccgacttctatggcgaagccaagaacagcgctgaacagagggctaagccaagcgcgtacccatgcctcggtctctcgggacccagcttggcaattgtgctggtagcgcattgctcgcgctatgagaacaaattagtacagggctaatgttaggaggacagggaactcacagaggtagcgcataaattcaggaaatacgtcctggttgtttagagctgcggtatcgaacgggggtatgtcccaggaatctcccgcctttaggttcttctgggtcacctgggtgagcctaaaaattgactcaacctcttgcgaggtcaagtccttcgttgggaggttattgtccctcctagctctcgtcgtgatgtcgttaagttcggtcttcatctcgtcaacctcggacctcccaaggtttgtagcccttgaaagccatcgaatggccgcttctgcgccattcttgacctgtatccaagcgaggtcgtcggaagttgctttcttcttcggcaccaccttcgttttcctaagggagaacttgagaggcattatgaaaagattaggggtgttaatgaggatgattgtgaggtactcttgtgtagggtagggggaaagaggacagaaatggtgggaaacagtggtgaacagtggtatagtttgtgttggcctgaggcatcacataaaactttcccgttgcgtcattccgcgccgaatctcgtttgacaacatatctgtggacgacgcagaacaatgaaatatgcaattcttacgcagaatgcactcaaacgggcttcaatagattattacttatgcggccagactgtatgtcactctaccaacaggtggtatcacgtgtctccttgcagacccagaccaagtctcgaaccgcgactagaggacctagggaaagtaattgtcgacgagtactcaatcgtccgtgataaatatagtccgttatttttggttcgaatagtgtgaataattgctgactcgtcatcagctgcaccaaaataccctgtcgttctcgcccatggcttgctcgggtttgatgaactgcaccttgctggcccatatctccccggtgttcagtactggcgtggaatcaaagaggccttgacggcgcggggtatcgaagttatcacggcgtcagtgcccccgtcaggctctattgaggaacggggtgaacaattggcccgaagcattgaggctggggctccagggaaggatgttaatatcattgcgtatgttccctccatttcctggttagagatatcgacatattctgaccctagtttttgtacagacatagcatggtgagacccctcaatcattgcgacagagttaatgcttatctgtgattaggggtgagcaataagatcatactatacagcacaagctaattaatgggctgcaaagtggtcttgatgcacgatatatgattactcacgtacgaccggagaagttcaaagtcttgtcactgaccactatcgcgtctccgcatcgaggtgtggcgcatcatagcttctcatttgcctttctgctaactgtctagcaggctcatctgtggcggactacgtatttgatcaaattggaggttcgtgactattcacccgctttctgagataactctgaagataacatctaattctgtgtagccgatcgcctaccccaaatctattatgcccttaatcgattaaatgtcgagacaggtgcattcgctcagctaacaagaaaatacatgaccgggactttcaatcctaataccccagatatggatgatgtcaggtaagtgccatgcatttccccccctatacgcactgctgacattccccagatatttctcctatggagcagcaatggagccaagtatatggtccccctttcggctttcacaccgagtacttgcggatattgagggacccaatgatggcctagttagcgtgtctagtagccgctggggaggcgatgcaggatacaaaggaacccttatgggcgtgagccatctggacctgatcaactggaccaaccggcttaagtggctagtcggggaagtaacgggcaacaaacgaaagttagttgattacaattacaagaagtattttgggaattatgctgatctttatgcaggttcaacgccattgcattttacttggacatcgcaggtatgtgttacggtttgattgggttaactgagactgataagctgattgttaattagacatgttggcaaaagagggactttgagaaagtgcccgatataattcatgtgggttcccccttagcggtgttatggctgtttcggatttgatatggaaattctggtgcctggagactcctggagactcctggaagtccctggtatgttctcattctcgcctactttgtatgtatggacatatttttgtacagtggaatcagcataatagatccgtcaattagcaacagacagttaaaataatatatttactcaaggatgcaggcaaagaagggtcatactatgtactacagatccaacggatttatagtttccgggtactagcggaatgagccctttgtctcgaaaagtgtggctgtgattgaggcgcagcatatatgcctaatccaaccttctagcctttagctattcctgcaacagttcttggtcagggcgagaccgcggcagttgtctgttgcttggcaatcagttgatctgcgaacgctcaaaacgtcattgcgggaaccttcgcatataatccgcactcgcccccatctcgcagccccacgacatttcttcaagctgttcattatttgcatatttcgagagcttgataattgtcgcattattttccacgaccgcacccccctatttgatccttcgaacgccgccaccaaccgaagatagagccccgccagggcccacgcgcccgccgccatgaccgcaaatatcgtattggacagccaccacacgcattatacaaatttggacttcctcagaggcaaggttgtactacagctaccgaccgaagcagccatcggagccattcacgtcaaattggagtgcgagagccgcactcgtctatccggtcccaagcacccccaacatgtgcactcagacaaaaagcgaacggagcttgaggttcacaaggtgagaggatatggtttatcacacctatcagtgggataaaatattgactggagcattggttaatcaacgaatgtagatcctgtacaaggttgccactgttttcccgacaccaggtgtcatgcagaatgggtcccctgcgcctgcatatacatttgctgcagggtcatatgagtaccctttcgaattcaaagtaaagagtctattctatggcaatcagaacacagttaacgccctaccagttccctttcaataattcatgcagcacgaccaacagcatgctcaccaatctaaacttttccgggttgaaagtcgaggtagctaaagacaccaatcgacacgtcaggaagactctcccgccatctttaagcgggttcccaggtgtagcagatatcaaatacttcgtcaaggccacagtcattcggccgcagttctacaaagagaacatcagatcggtaagtagtgatatgctccgatacctatgctattgtcgcactcgctaattggtttcgcagattgtgcctctgaatttccttccaattgagccaccaagagtcgggaatcccaatgaggaaacctacgccaggcggcaacatcaattctccaaaacccagggcgcgtctaagaaaaagagcatattctcacgggggtcttcttcactccgagagacgtacccagagcctcctcgggtgtctgtggatgctcgacttccgaacccgtctattctcacttgcaacgaacctgtccccctccgtctcctcgttaagaagctgaccaagggaccggacgtaatctttcttcaaatgttgcaggtggaactaatatcctacacgaaaattttggcccaagacctcactcgcactgaaagcagctcgtgggttatcatgagccgcagcaatatgaatatcccgttaggcaacccggaggactccgtaggcactgattggactattgattcaaacttatggaatcggtatcccttacctaactcggtggcaccgtcctttgagacatgtaacattgaaagatcttatgagctggaaattcgagtgggcttgactcatggaatgcaggtatgttgaaccattaaccactagagttgtctcttggctgaccatggcatagcctcaactgattgttctgcccctgcgaatgccagtcaaagtattctcaggaatcgctccaccacaggccctcctagatgcgatggccgctgcatcgcttcatccatcttcctctagactgaaaccccagcccagcttgccaggagaggtaggaagcagtcgaccagtcatgccaccacgaccaaccggtgaacctgtacctgtcaattccggagatgcatacgacgacgcaccacccagttacgaggatgccatgggagaccacctgagtccagtggatggaccacgtcgcgagtatcacccaccagacgcctcatcacaaagcacagtagaatctggagctgatgccaagtccatagcccaaccgggtaaggcgcttgaggatggacccgctgcggaaggatcctcggcgcctcgtcgaggcaatcgtgcttcctcggagtccttcgacatgctacctaccacaccaccggaatctcaatctggatcgcctcccatatcccccgtgcgacgcccagcgagcatgatgaaaatttctcagaacaccgttgatgaagaaagtccgccgcaatatgagcctgtcgcggggaatcacctgaacgctccccaagctgtgcaacgccagccttcacggaataatcttcgtcctatgaacttgggcgttcccaatcggaagcctgtgccgcgaagtccaaatccttgaggttatggactcaactgtttcactaatttggtcatattctcccctctttcacgcttagtgtccgggtttgaaattaattggagcttcatggcactttgcctgtgattattccagcactcatagcattacccatcaaagaaactgcattattgctaccttcgaactcgataccccatcacgtttgtgtcttgaaaagtttttcaggttatgttcttgttcttgaaatgcatcatagcgttgtgtctaagggatctataatactagtactggtgtagcgcctgttgaatatgatagtttatttacttccacttccgaataatgagccaaataccgtccgatatcatcgtggcgcgcatcgtggcgcgcaggtcagtatggaaataagttcagatgtgcgctataccgaaaacggctagcgcaccctccacgcggattgagctttcctcttccacttgagcatatgtccaatcctatgggcatctgtcctcaaattgaatcttaatcgaaatccgctagaccagctcggactaactggattagccccccgaccgaaacattaccctcgagtattcgactcggaacctcctagcaacacgaaaaagtacattcaccgcgtcaatgatttagctcgcgactgaccatccacgatgcgtctccaccttgttatctcgcgccatggcctgccggtcacgcgcattctctggacgacgacttcgtctacttctgtgttaggcgaatatgggactcaacgcccggcatcaaccgcagctgtcgcgtcctctcgcaccccgaacatcgccttctcgaatggcgggtacacggtcgcacaactcctcgaggatgtgaacgaagttgtgccgctggaaactgaacctagtatctttgatacggagttcagtggccagtggggattggaagattatgttgtcgaggttgccggctcggaatgtctccattttatggaggttgacggcttgctccgtgacggagacgaagttgtgtatgtacatctaacaaatgttcttatatcgtaaactggactaatttctcgccttctagcatccgcgcccttcaattggcagacctacggaccagaaggctatgtggtcgccaccaaattaccgcggagggcaagcatctgatcgacggcgtgcctttcgggtcaccgttcttgaaaagaactacctctacacgacctgcaataactattcccccaagaaagaagcggcgcaccgttttctccggctgggaccacgctccagaattggtggctgaggaagtccatgctgacgaggaaggggatggagagtggcttccgcatccaaacaccgggttcggaaaggagctctctgtcatgcccgccgagcacgaagagtccctaggcacggttattcgtcaccctgttgaccatgccacggaatctgacagtgaagtggatatgtctgagatgcctgaggttgaggaagatgaactggagagcgaactccaagcactcaaagaggacttcgacgaagcttctcaatttattgatatcaggaaccagactcggaatgccagtgggcacccactacgtgctacctcgatagtcaagcgaccaacttccaaggggtcacttgcagctgcctcatctctttccagcaagcggtctcgtgcggaagacccatctcctagagcctccaaggctgtgagattcaacaagggagataagcaggaggataaggaaatgcctgatctcccacaacttccgcaggccgtacacgtacagatcgaggaaagtgctgctgcaacctctgattctggttcatccgagtcatccatgtcttcttcgggcagcgattctgacgatgattctgatgatgattccgataatgattccgatgatgattctgatgatgttgattcttcgagcgaggtcgagcctgcggcagaggcaccttctgattctcattcatcctcaagctccgatgattctgattcatcagactcagattccgaagaggaagccgccccttctatcccggtttctgtgggcgctcctggtggagggtcactacgcactaaaaaaaacaaccagcgcatcaaactacgccgccgtctatccaagctcaaggagctaggtgctcttcctgaaaaagcaggtttcgatgcattgcgagcttgggaagacagccacggaggctggcatactccggaacaatatcttaacccggagccattcgtgcaacccccaaaacctgtggaaccggaactagaaccagaaccagaacctgccgaatcttcgaaaaagaagcaaaaaagagagaagaaagaccaggagcaaaaagagttcgaagccaggcgccaaaaattgcttaacgatcttgcattgggtaatggtgtcgatgtgagcgaaatatcggaaaaggaaaatgtcccaccggctgcgtctgccgttggagacacccctgtttcagaagaaatctccggtaaggaagagccggagcaggaaccttcgaaccgacgtacactggacatagctagctcacgacgcatgctgttcggatctcttggaatgcgaaccccgaagaccaaggaagacgaagaagaaacacggagaaagcttgctgccaaagctagtgcatgcggtccccgaaacaaaccctctaagcaagacatcggagaagaggccgaccagatgcaagaggaggaagatgcatccgacattgattggcaaaacaagcttgtcattcgtgctgtcgagtgtctctatccccaggttgatatgaccgcgcctccttatccatttgttcaacgttgggataaagaagccaatgccttgattcgtgagctcaaagggcccagtaagaagcggaagagaaagcagcgtgttcaagtctatgagggacatgagcaagaagaatacgatgaaaacgggtattattacggccatgatgacaaatatcaagctaatgaccaaccgaataacggttattacgaaggtgaagccgattcccattatgagggccaatgggaaggcgaagctgctccttactatgaaggccattatgcaggcgaagctgaaggagatcagatcgattatgacgatgctcctgagcctggacaagcacccaaccccactttggatgacctacctgcgattcctgccgacatgagttctgttcctggtttgacagaaagtgaagcaaaggtcggcgcaatcattgcattccggcagctagacatgtccaaagccacgaactggcaacctcaaatgtctgagtaccgagtagccgaggtacgctctattaaagaccatggggtgattaatgtactactggccaagcgggaccgaaagccccactcagcatccagcgagtatgacgagccccgtcgattcagcaaatttgaagtaccagacttagccaacgatgagggagaggatgatggctatcgcgagcttgcctttgcggaactcagcgatccgaagcttatccaacccgcagcgcagtcaggtgcggaatttgaaggccagaacagagaaggtagcatgtcagtgaaataaactctgattgaaggcttatgcttacatatctaaagtgtctctgtagttcatgaatccgtactgaacgcccagccaaccctttccgaggaaatgtatattgacgacacaaccattgtcaccatcggaaatgaagtcagccatattgagtcgcctcgtgaatccccgggaatgcccgatgaacctatccaacaaaccccaggcagagacctgccgcagattcaagtccagagtggatcgattcagcgcagtgtcactcctcccatcccttcaccttcttttactggatttcactctgctcgatcctggcagcagatgacccctggtgtagagttcagccgggagcttgaaggccatactctcatcggaggagacacgccatctgctctagtcaatcgggacgaagatccttccgccttgtcatacgcttctgcaaatcaatccttcgcggatgaaaccgaggaccaggaaatgtcggagcatcaagagcatgagcgccagattgtcagtgaaaatattttaccgcctggcgattcgggggacagcggtcctcagtctggctcacttctgtctaccattgaccgtagcggtggtaatggtggtcagggtggtaatagtagtgatgatgatgcgtcggattccgattctctgtttgtgaaaagcgatacgaagagagaaaaacatagtgtggctcccaccagctcttctgaatcatggaaagatcttttgaacagattaaggaatggtccaccagacccagacagcaacaacagcagcaacagcgaagccaacagcgaagccaacagcgaagccaacagcgaagccaacagcgaagccaacagcgaagccaacagcgaagccaacagcgaagccaacagcgaagccaacagcgaagccaacagcgaagccaacaacagcgaagccaacaacagcgaagccaacaacagcgaagccaacaacagcgaagccaacaacagcgaagccaacaacagcgaagccaacaatagcgaagacaacaacagcgaagttagcgaaggcaatcaaagtcccgagcggctggaagatagtctgcagcactcctacctggatctcaatttctcatcgctcgatttcccacggccatccaactcacactctcccaacccgccaacgagtgcccaaccggacgcgcagtctcaaaaacaaacctcaatcctttcgccatttgagacgaagcccgccgcaactactcgctccatactctcccagcgggtgcatgaacccgaatccgcctcccaaattctctcctcccaggcatccgaagtgattgacctcacttccagcccacgtgaatcacccaaacccagcagctccgatccgaacccatcccagcgctccaaatctgcagtgtatgggaaatcacaacgtagcaaggacatccctcgctcatctggacgtccaccccgagcttctacggggagactccaacacatggtggaagtgagtattagtccttccagccagaagaagaagcgctcggcacgaaagttctgagatacggctggattatgtgtcattgaaagttgaagagatattggatgtactttcattttacacgtctgtatatttacgggcgcagagcgatggcgtctaggaacttgcacattctttctttttttttttcctggacattattttatttcggctccaatacaagatattattctgaaggtccttgcagatcatgacaaaaccctgccagtgattggttggattcatggataaggtgatgtcatggtagttgtatacttcaagctctagaggtattgtacatctcccacatcttcgaagccttgcagtcaatcaattgaactaaccaaggaactggcctaggaaagcaggttcttctttcatcttccctttttccctgcccctaaccatgtaccgtctaagtacgtggccatctatgcaactatcccggcggtgtaactttctactctcgtcattacgccatatttcctcaccccgcatatccagcttatcctggacctcttctgctgctgcttcttcttcctcgtctatcccttcaatatctaccaagtcgtcccaatttaagccaattcaatccaaacgcaatctatccacaatgccccaggaatacaaactaaaggacatctcctccttcgcatccctcaactctctagacaaggtcgaggttgaaatcgaaggcattgaggatgggaaggttctcctcgtgaagctgaacgataaagtctatgcccttagtccacggtgcacgcattacggagcaccactgaagaatggcgttgtcactgcagaagggaggattacatgtccctggcatggaggtgagatgcttgtttgagtttcttttggttaggggaaagaaaagaacaaaatactaactactatatctacagcctgctacaatgtcgcaactggcgatgttgaagatgctccagctcccaacgcgctgaacaaattcgaggtcttcgaaagagcaggcggcgtctacatccttgccaaagaagaagatgtcaaagcaggacagcgcaatccagttgtgaaatgcactgtgtcacagccaaaggagaaggttgttgtgattggagggtaagtcacccttttttccttcatcactatgcacatgtttctacatttcctctcgttcgaataattggatacccatactaacaacaaacagaggaagtggaactcttggccttatccaagctctccgcgagctaaaataccccggggcgatcacaatcatctccaaagagcccgatctgatcatagatcgaaccaagctatccaaagccctaatcacggacgcagccaaaatccaatggcgaccacgagagtggtatgctgaagccgccatagaaactatcacagatgaagtgactgccgtggacttcgaacagaaatccatctccaccaaatccggccaaaacatcccctacaccaaactagtcctagcatcaggcggcaccccacgcagactcccgctacaaggcttcaaaggcgagctcaagaacgtcttcacccttcgcaccatccaagatgtccgatcaatcctcgcagcagccggcgaagagagaagaaacatcgtggtaatcggcagctccttcatcggcatggaagtcggcaacgcgctctcaaaatcccacaatgtgacaatagtaggcatggaaacctcgccaatggagcgtgtaatgggcgcacaagtcggccgcatcttccaatcaaacctagaaaaagccggcatcaaattccacctctcagcgaacgtgagccatgctacagcctcctcctcagatccgcacaccgtcggtactgtccatctaaagaacggaacaagcctcccagccgaccttgtcattcaaggcgtgggcgtccgcccagcgacagacttccttcacgacaacaaatccataacccttgagaaagacggctccgtcaaaacaaccccccacttcgtcgtgccgggcttgcaagactccgtcttcgccgtcggcgatatagcaacatacccctaccacggtcccggcgctgaccctgccggctcgccagtccgcatcgagcactgggacgtcgcgcagaacgcgggccgtgctgctgcacgagcaatcgtgcatgcgctgtgtggtccgctgtcgtccctgaaacataaggtgtttattccggtgttttggtccgcgcttggggcgcagttgcggtactgtggaaatcccattaacgggtatgacgatgttattttgcaggagaagggggaggcgaaattcgttgcgttctatacggctggagagaccgttgtggcggttgccactatgggagttgatccggttatggttaagtctgcagagctgatgagagtcgggaagatgccgagcaagggagatattgctggtggtacggatgttttgagtcttaaggtttagctaggatatgatgggatttgaagtttggatcttaatggatatgtcgggaaatagtttggaatcaagtgttttctttggtcaattggcatatacacattcgaaacaaatcggaaaataagaacaagcaaaccggaacgcccatccaggatgtagtcaacattgatgtatgatatcggtgctcatggagacatgtacacagagcgaatttattcgtccttgctcttcttcgacttggaagtggacttcttctccttcttttccttcttctccttcactttcttctccttcttttctttcttttccttcttagggctaggctccagatgcacatccacagtcgacagctcttgcactgccgacgccgccgggacgtccatcacgggaatagacccagagagcttcttcggcgatgggaagaacgacggaggcaaggactgtccctggcgctcagactcagagagtctctcctcctcctcaacagaaagcatagtcccctcaatactaaggaacccgcgatcgcgctccgaaccaggaatgacatccacatcaacaacacggaagcgcacagagccagttacgcggtgtccagaaacagactggaagtaaccggtgtgagcagacgcatcctcctcgccctcgatcgcgatctcctcagccgaaagcgaagcaggcttgaaacattccttctcggcgtcgaagtcggccatatccccatcagaggccgagtcgtcatcggtcaaagccggcgtctcggcctcctcgccaggcggcacccacttccagttcgaaggcagacgcttgcgctcaacgccgacagagaacaagttgaacacgacagcgccgaggaatccctccgactgcacattcacccatccatcgagagtctggccgcgctttggccggaacattaggaacgtagcggtcaggtagacgtacaagacaccgtactcgtccgcggatttggcgagggtgagcggctccgggttcggatccgagaaagagcttgtattggccggcggattgctggaaatcgaggcatgggagtacgccaggacgatgcccttcagcggtgggaagtaggttaggagcagtggcgagagatgctcggccagcagcgaggccagcgcgtgcgttggcgagatggagatgggcgacaggggcaggtagagggttgctgttgtgagagtgaagggggactcgggatcggagtcttggacatgttgtggagcggcggcttttgaggatggggtttgctttcgctttttggatggtgatgtggatgcagatgcgtccttgtttttggatttgcgcttgcgctctgcgtccgctgtgcgcagcggcatgttgtcgatttccatttcgtcaattgccatcgtggaggcaatttgggcgctccacggagcttgtcgtgtcaatgtggagggattagagtgcttcttttttttttctttttggcgtcgagaactttttttttcatttggcttttggtatgacgagatgggaaggcggtgggactgggcggtgacggcacattaaatggcccccggactattttggggttggttacaatcgccaagtggcgcttagtatctattctatcaatatttttcttatttttgtttgatatggtgcaggtgaggttattcaggtgaaattgattccctcgtgatgtcgtcacttctgcctttcttcgggtgggctgttctccccaatgtgagtggagcgcgatgcggagctatacaacacgtggaataggagctaatatgaatgacagtatgctacatcgtttctacagagtgtctactatggcatcaccatacgcgccggtgaacccaagccactcccgcaaactccgcggttcgaacgtcatcgtcgccgtatcttcatcttcgtgatcaccagctacctcctctacacgctctacgagacattctaccaggtgcagcttgcaggtgattactatcaagccctcggggtatcgccatttgccgatgaacgcgcaatcaagacccgatttcgccggctcgctgctcagtatcaccccgataaagtcgggctggacagcgggtccgatgcttacttcctgtaccttcgacgcgcgcaggaaacattggtggacccggtgaagcgattcgcgtatgaccggtttggaacagacatgcttggatggggggagcagaagaccatgcgcgacttcttgatgacctcgctggtcaagtcgatcatcccgcaatatgtcgtcgggtttatcacaacgcttgtgctgaactggctgtggtgggcgaattggggccgttacgtgagtataccatattaccagcagatgttcaattccattcgctgactgttgttagtggcgcttctacacgttcgccgcaatgctgaccctcgaactcggcttgattacgcaccccaaggctgtgttcatgcctacctcataccttcccgtcgcgctacaagcatggctccctagacaatcgttctacctcctccccttccagatcctgacgctagcacgccgcgcctccatcatgctacacattttcatctcgcaggccgcaccacccaccgccaaaatggccgggaatggcaacggcgataagatatcaccgcagactgtgcagcggatcggagagttgatccagttgacgcgcggcacggatatggaggcgacgcgggcgctgcagatgggcctcgcacctttccgtggtgatcgtgaaaatgtgtcgaggctccggcggggtatgaaggaagggctgatcctcggcggggtgcggtccagtcctgaggtgcaacgtgccgtggcacaagtggttgaacgacgcaaggccgagggtgacagtaagcgcgattgatggttgaaagaggttagatgtatattacatataagctattgtattcccattgtaatccgacccgattctgaatttttgtcatttatctggacgatctcttggcggtgtcgcgtaatttggccattcttttggttccgtggactaattagcgaagttcacgtttccctggcacgtagagccgtagagccgtggtggcttgagaagactctcgtgataccctcaccagatctgttgagaatgggtccctctggactggatctccaatagatgtgagttatctgagtgaacgacgaaaaagacgcatctctcgagacatcatgcggtcagtgagttattttttctccgggatgcagcgggtgtgaaatgagatcaacggattagggttgggtttgtgtatggagatatggaatgtcgagtttctagccctgtacgagagggcaatagccggacggagagaagacgcagatatcatagacaaatccaatacaaatacaaatataagaagagaccaaaagacgaacaaaagaaacgaagctgtatatcggtatcgtacggtactgtcaccccctcgtatcacgccctccccgttggtcccgaagtggctggacgcaagttgtaatgacagtaccaggcccgatgtccacaccttcaacaccatcccctgtgcttcatggcctgaatgagttttttttttcttaaacgatgaagagggcccacgatccctttttacttcgccccttccttgtccttcttccctttccccttcccccttccccctcccatccctctttctcacagactatgcgactacacatacttcttcatctataacgggcggtagagacacataccacgtcacggtgaattgccttccgtcaattattccccttccatatccggtaccgcgcaaatcccgtttccaacacccatccatcatgcccgccgctactccaaatggtcgctcacgcggagccaagaattcacccaactccttgatggtggttctcaagctatctggggatgccctccagcagttcgccagtcccagcaagagccaaaataatactcccaacattaaatccaacgacaactcttcaccagcctcctccgccgagctccctactgtccgcccatcttctgccgataatggctccgacgccgacgccaattctacgcccgccacaggggcgactgcaggcgatgcacaacgtcggaagggagttccgggtcctaagccaggaaacaaaagaacaaaagaccaaaccgaccctaccgcaaagtcacggggacgccctggccccaagaagaaacccagactgtaagccaacccgacacattttcgaatgagcataattccagaaaagaaaatagtcgaactaacatatcatcgatcttagtgacgaaggcgaagccacaaagattccagctgcacagcgtctgggaccaaaagccaatacgggagccatcaacgccggtctgcgcgcgctagatcgcaccggagccgcgtgtcgcaaatgggagcgcaagcccctacagctccgcagcttcaccggcattttgtggcaacttccatcctggcgcacaccgggtatgcccaagtccggtgacgcggttaatggcaaggttgcagcgctggaaagtggcgacagcgacacaaagaccacgcttcatgcccccggcaccgacacggccaatggcagcagtgctgtgcctagtgagaagagcaactctggggatggcgatgtcacccctacttctcatctagtcgagccctcctcgccagccattgctatgacagcttgaatacgaccgtgacgagttcggatgtggttttcgtgctgtacttataagtttcgcgcatcttctgtgtctttctttcttcttctttacttagggttttatgtcggggttgggtttggcgttggagggaactgtttttatggctaatggcctttctgcacgaagggctctttttttccatgtgcacgggttgtagccggggatctggttatttccctcggtgtgttctgtattatagcccttttcttcttcttcttcttttttcttctgctgacatcagctatgtttacatcttctgctcgaagatcttgctctgtgggcacaacgcagttaattttgctcatgtggtctgtttatacatgatagtatagagctatatactactcccttagatctacctatgttgtatctacgtattaccgcctttcctatgctacatcttcccttgtgctcaccgagtactccatagacctgctctgatcatcatagatctgcttactgaacaagactgatccacccgtggactcactgatactcgctgagcgctctgattggttgtttcccgctgagtctgggccaggccgcagttttaggtttagcgcgcctccgtatactaagtagcatttttggctcgcaggccttgatgagctggtcgatgcaattaacgacccaacaattgctctccaagatgaggtgcgaggtgtacaatggatcttggagcatctgttcgaagaggaaaaacttccagcatcgttatacgatgaactagaatatagccgaggggtcaaatcctcggccaagtcctggacaaaaaccataagaaagattgctgttttttcatgaaggatggaaagtaatcctttgtggaaaatggtcccggaatcaaaggagcagagactggcaagtgaagacgttccaggtataacttcctagttaattttttggttatagcctttctaaactgaatacacggctacctctatacaagagctgagctcgccgtcaaagtcttggcgatatcgtgagaaatctgacacagctgcaaaagagtctagccgtggctgtctctgcatggacacatgcaccaacgagggcagtcaaagaccctgggataagaacaagaaccggctatcgatgaagatcaaggactatgttagcaaacttggtggcggctcattcttgtatcgagtgtctacttgggccgctttagctgcgatgatggcctttttcactccggtcattcacagtaggcacttggacaacgagttggggccgggtatctatacatccaattctctagaatgggtcctgaattgggttccgtcaatagtgccttgttggtcttcaaagaccctggtttccgcaatttggatgtctagaggccctctcttcccgagtggcagcagatcatcgtaacttggacacgaaagtcactttcgaatgcaccggattcggtacatccgaaatgaagaacagcagacatcatccaagggtatttcgaagccaggttctctaaaacaaactgtctaccacaacccagcaaggtctcatagaccgctgcatttagtcatacaggatgtggggcgctgtctgtatcattggcgatgataactagtgagcctggcccttatactatcactagcttcattatcaatcacacttttcattgtggagacgtaagctggccactcttttgctttgagtacttcctatagatggtccacattctcgctaaggacctcagccccaaggaaatcaccactgtcagcctcctttgacattttctacactgccaaagaccgacccgatgacgtcaagatcggagtcacaagtcaagcgcctcttcatgttttctcggactaggaggatggttattcgggatatttccatgcccaatcttaagcctgtctctgagattattgattcatcatattcctctcggctgtctggattggggttttgcctaaccaaattggggccgagaagttagtgatgtatttgtgatgacaaatgttatcggccagccttagctgactacatgcgaatgagttgtcagtcttacatgagatttggcgttctctttgtgtgtctctagattatatatagccaaaatccatattttctatagaagtatcgcaaaacatcttcatcatgggccaaccatcaatcccccctacccccacctcccccccggcnnnnnnnnnnnnnnnnnnnnnnnnnnnnnnnnnnnnnnnnnnnnnnnnnnnnnnnnnnnnnnnnnnnnnnnnnnnnnnnnnnnnnnnnnnnnnnnnnnnnnnnnnnnnnnnnnnnnnnnnnnnnnnnnnnnnnnnnnnnnnnnnnnnnnnnnnnnnnnnnnnnnnnnnnnnnnnnnnnnnnnnnnnnnnnnnnnnnnnnnnnnnnnnnnnnnnnnnnnnnnnnnnnnnnnnnnnnnnncccccccgcccagtgcggccggtaaaaccgccatcatcactggcggtaacactggaattggctacgaagtcgctcgtcagctcctcctcctcaaagcatcacgcgttattataaccgtccgatcaaccagcaaaggtcaggaagctgtcgcctcactacgcgcccatccggaagtgaaaaaagccaaccctaccgccacgattgaattcttccatctcgatcttgacgattttcaatccggcgtggagtttgcaaaaaagatccgcgccgaggtctctgaactacatattcttatctgcaacggtggtgtcaatctgatcagctacgaagctagcaagagtggtcatgaacgtgttatgcaggtcaactgctacactcatttcctagttacattagaactccttcctcttcttcgtgcgacggcagtgagctgtggcgaaccatcacgtctcacgttcgtcgggtcgagtatccaaaacttcaacacactggcgaaaaagcctctaacagattccaagactgtgatcgaacactacgatgacagacagatatacagcgggctaaatcggtacgcggatagtaaattagccgtgcatgcgttcgtgcagcgactagcgaacatcgtgccgtcttcagagcttatcatcaacgatctatgtcctggcatggtagctaccaacttcgaccgtggactgccgctctggttgaagcctgttatggccgtgttgaggaggctgattgcgagaacggtcgatgacggggcaaggacggttatctatgcggctgttgttgccgggcaggagacccatggaaagtttttgcagagtaacaaggtggatccgtgagtgcttccccctgcagtgaatactcgagcatgctaatgattactctagaggcgcacccatccttcaggagaaggtcggacagacctttagcgagagattgtggaaggacattatcacggaggctagcaagtatgacgccgagttgcagagctttgcttgatttataccacggaaattgttggacgtctctgttattatgttctgttctctatcagttactatggcttcgtgtgggataggccacagcatttatacacatctacgatgaagcatttcgatattatatacacaaaatgcataccagctccgccgtataatacggtaggacagttgtaaaggtcttgagtagtcagactatatcatcaactaacaaaacccactcaagaaatctactagaatatcaagcaccctcgcgtgaatctaatccgcaagccccttgcccaaataatccaacagattggtccgatgtgtttaatatagactagacatgcatcaaaaaaacggagctgcattagaggatggagtaccgtactaggcaagtatgaccagatcggttttaggacctacgctacaatctcttgccctgtcctggatatgatccgtcttgctcttcctcggttgctcggatgaatcgttggttcatacctatacgacattatgagcaatatatatctgagagttactcctttccttcatttacacaaatcatatagtaaaaccatttacttatcacctcatcaccatgaaccgcatcgacgtgcaccaccacttcatccccccggcctatgtcaacggtatcttaccttcccggaaacataataaacataattaacaagactatagccttcaactcaacctctggtgacccctccggctggcacctccccaaatggaccccagaatcgaccctctccttgatgacctcccattccacccgcgcagccattctctccctgaccgcaccgggcacctctatcctatccgattcccctatggactcagcggccctcgcccggcaagtgaatctctatggttgccaacttcaccgggaaaaccccactcggtttggtttctttgctagcctcccgcatctgacacctgaaaccatcccatcggccattgaggaagtcgcttatgctctggacacactccaggctgatggtatcactctgtacactcggtatagtggaactggatatctcggtcatgctgcttttgcgccactctgggaggaattgaaccgccgaaaggcagtagtttttatccatccgacaaacatcacttcggacgctcaggatcagcctcagatgggcattgcaaagctgccacagccgattattgattatcctcacgagacatgccgaaccgcggtcgacctgattacctctggagctatttcgaagaaccccgatgtcaagatcattctgtcccacggaggcggaacactgcctgttcttgctactcgggcggcaaatctattgtacgatgcgggtctgaccgagatcaccccagagatattcatggagcaggctaggggtttttatcttgatcttgcgctttccgggaacgaggggaatttggagttgctgttgggcaagaccgggtttgcaaagccaggtcatgtactatatggcagtgacttcccttatgctccagttaacaccattaacaagtatgtagggatgatggagggattcttcgcaagagaagaggagaaggaagaggagattgcccggggtgcggcggtagagttattcccgcgatttcggattgaggaggatagggaggaggtactgacgaacccaggctattgatagatacgtatatacagggttgtgtggagagaaatacattatcatttgacgatggtatacctgaaggggaacacttccatcttttacttcttagtattcaatctaacacttgtagtactttaacagatttcagcttctcattgataatgttaactagttaactagttaactaaataacagataggttattaataccggtgaatgaacatatctacaacgatcgatgtgtttactacatgcgaagaagctatgtatatcggtagcacagtacacgggcatgcctaagtccacatcagctcgtgacattatgctcgtctcccctcttttccttgacactgtccttctccccgcactctgtgcatgactgagactattcgtggtttctcaagatctagctatttcactatgacttatatcactgtgactagggtctgaaattccggatttgacggctgtatttctctttgaatataattatagtgaggtcgcaacgtggtaagatctgctgctttcggacctgtcacgcaacgtcggcacttttgccggtcttgtttccacgcatcttttacatattccagaccttccacgcactttcgcaccaaatgcacatatgatccccacgcactttgcgcagtagcttcaactaccacgcactagaaggtctgtcttcacacgcaccactacaatggctaatgcttagtaccacgcacttacagaacccctccactgagtagcgcaagtgtctaaacgaaagaactgtggagccaaaagccagaagcgaagcaggaacacagaaatagtggccttggtttcgtggcatcagttggggggcgacccgtgaacatcatggccgatgctccattctccccatccggtggagctcgagctccgacctcgtaccccaacatctcctccatcccacgccgctcctcctacgcttcagtagtatctggcaacacattttcctcaccaacctctacttccttctcacatctactcaacgactcccatccaatcccctaccccccgtccgacagccgagtccaccgggctccgttcggcgtggatgccgcagacatgcacatgaactccgcctggagaaacacaggttcaacagactcacttcctccctggtcccgcaagtatgccggctttctacgctcggccgagtttccgcacggcctaggtctcaccgacagcccggccttcctcattccatcttacctccgcaactcccgctacatcgcccgtctcgaaacagcccaccgcgctaagctcgctgctcagcagcgagaaccctcctcatccacaacctctaatcctcccctttccgcatcctccagcaatgtccatctgccccgcattgccccgtcgcaccgcggcatgacatatgatatcatagagaaggaaccgtcggcaccggccgatcccctcatgcccttgcctagccagtggagctccgtagacaagttttctggtctggaactgtctaacgaaaacttcgatgttcgctacactggtcccatgcacaagcatgatcatgaggccgctgccttgcgcgcagatcaccctatgccgccgcagtgcgggatctactactttgaagttaagattgagtcaaagccgaaggaagggtatgtggatgagctgctcggtggatattgggggtagaggctgacccttttttttctagcatgatcggcattggcttttctagccccaaagcgtccgttgagaggcttcccggttgggagacagaatcttgggcttaccatggtgatgatggaaagtcgttctttggcgagagtcaagcacaaggtcgagcgtatggaccgacgtttggtgctggcgatacagtcggatgtggtgtgaatttctctacaggatctgcgttcttcactaagaatggcgttttcttgggtaggtttttgtgtggaatgtaatgtggatatcttaggctaattttgacaggaaatgcgtttcacgatctgcgcaatacgaatcttttcccgtctgtcggaatgaagaaactaccgccagtacatctcaaaacgaactttggacaggagcctttcgtttttgatattgatggcatggtcaaggtttgtgctgtttccatcccatactcggaagttgtcgagctaattcccaccagcaagagagattcaacgttctgtcagagatcaacgaaacatccacggctggtctacaaccaccgttagacgagtcgacacttttgcaagagttagtagcacagttcctcgcccatgacggctacgtagacacggctcgtgcattcgcagaagaggtggccaccgaaacacgggccctgcagaacggtcgcaacgagccactgaagaaatacgaagtcgaggaagaccgcgaggctatcaaccggaacagtgagtctacacctccgcattcctcccatcgccaagtccccactgacagcccatagaaatccgctccgcaatcctagacggcgacatcgacaaggccctcaagcacaccaaagcttactactccaacgtcctagaagaccatccagaaatctacttcaaattgcgctgccgcaaattccttgaaatgatgcggcagtccaacgaactctccgtggcaaccgccgcgaagcgccgccgctcgacatcctccaactcgcacgagcatgctgtcttcgatcaggagatggagctcgacgacggggatggcgacgcctgggccgcggacggcatggataccgaagaaccagaggtcgtggcgcagttcaaccagctcctcacagaggcagtacagtatggccagcagctgcgtgctgattaccccaccgacgagaacggcggcgataagaagctgctggatgatattttctcgctagtggcgtatcctgatccgaagagatctgttcatggccattacctcgattctgaggggcgggttgctgtggccgaggagttgaattcggctattcttggtatgttgcttcacctatttattctgctgcgttgtctctgcttcctacttgcaagcaaaaatgctaacacagcactgtatagtctcattgggcaaatcatctgcagcagcgctggaaaggctataccagcagactgaagtgctggttaatgagatcagtgaagacggcggcgctggggcgttcattaatgttcgggatgacattttgctttgactggcgctgggttagcatcttgttgtcctttccttctttttttttcttcttcattgatgttcctttgtgtggacgggcctaccgatctcatatatcagttttggcttcatgttcatgttgatttacttctactttcacgactctctattttttccactttccttttgtcagattaacttctacgtatctcttagccagaatgatgagtccgcttgggattaattttgaaagttcaatgacctacctaggtactgggtactggtagcattgtatacaattctttgtgacgtcaagttcattctatacctagaggcggtgaggtccggcaatataaaagcggtaaggcctcgcgacctcgcgaacgctggggcttatctcatcccggctaaatttgggtatccatcgatctccgcctcctcgaattaaagggactcgataatacggagtagtctgtgatacctcgaacctacaaaatcttctgatgatcagtcctctccacacactcagctccccaaaggggccacattcttgacatggatccacataactatgaggatctcagcattcctactcattcacgcgcctccaccaccctacgctgctgctgcggccacaatgattgtgctttgctcgagcataacaatgtagctcttgaggggttggagaaagacctcgcgactgctgctaggctaggtcaggtacgtctctttgtcgaattagttgcccaaatcatgtgggtatgacaacacgccaagctgtttggaggctggctgaaccatgcatgttcgatttgatacatcagcttatcctcattcctcgcggaacactctgtatctcattacttctgttctcctttacttcttcatttcaactactcggactgcacattctgcataccttgtgcacaccccacatgatttggaatcaaatggccacccttggatcacaatctcccattctctcttactgtgttggcgtccgtcatggccacctttcatgattatactgtcaaggcagaatgtttggagccatcatcactgacttttgccctacaggccttgctccaccgtcatgaaagctatatggctgaagcggaagaggatcgtcatcgtttggtcggcagcattgaggatctagaacgtgaaaagcaacaagttcaagcagaaaatgcgcgcatcatcgaagagaatcgcagtttattagagcaacttgacagtctgaatcaagcggtcaccgagtctgacaaccatgtgaagtccctaacagttactttggagaaaaccgagtcagatttgcgaagattgacagtggctgcaacgcgggccgtagagctcgaggcgcaactagctctcatggagacggagcagtctaagctccaagaaagtcttatgtcggtgcaggaagacgagaaatcggccgtccaacggtggagaaaagcagagagcacgctgcgagaccttcacgatcaagtcgaccgtatcgagagagaggcacgcgaggagagggatcgacatactgagctcgtccaacgcatggaacgtaagagggatgtggagcgcgagctagacaatgcagcgggacgtctcaagggtgccgccgcagcctccgaactcaaccgcaatgcaggtggtacaaacgttgtctctcgtttcgttaaggacatattgcaagacaacgccaatctgcaggttgggattatggagctacgcgacatgcttcaaagctcgaatgaagaagtgcaaaatctacgggaacaggttatctctcatcagcccctggccggcgtcgatggtgacaatacacagccaaggcctcctcccatcacgctgagcgaggagctacgagcgaaggaagaacgacgcgtctctcaggaattgcacatccatcatcatttccacacaccaactccagccccaactacgaagaaggaaaaaagcacgctcaaccgtcgcgtgaagaaacgccgcgccgctatgggaagcccggcagtgctgcattctgcgacgcgggccaactcgcctcgaagagccattcatcgctcccagtcatctgggtcctctatgtcaaccattctatcgcaaacctctgtctccatcccaccctattcatcctcccgccgctggtcctcaaactcgcgtgctggggattcgctggcaagctctcctcggtccacgttccggacgtcatcgatatttgatcgtgttgaacgtggccctgatttctcacagtctaccagccctgatagcaccgtgttctcttcccctttgatgcagacacggaacctgaagggtcttgatatgccataccgcccagtcggtggctttgataatcacgatgcacccgacgatctatctgcatttgataatgatttctacagtcgccaagacttctttaacacgggggataatctcataagagagccggctatccccgaggagtccgaaccatctccaccaatgtcatacttctcgcctatgggtgaaccactgacgaccactgatgaaatttttactatgcatgtacagccatcttccttgcgcagatcttcttcccatgacagcttgctctccatctccgttgctgggatggacattcatacacccacaagtcgccacaagcgaatgggagactggcatcccggcatgcggatccctcggcgcattttgtcacccagtgtcgaactagtgttaacacccccggtaatctcaactccggccgtcacagccgatcgtgcaaagagctcagagtatacatcccagtcattgcttgcttccatggctgcgggaaacagcacgaagtccgacacggcatccgttgtatccaccgacagcaccagcacccactcaaccgcacttcatgggcccgacaaagttaagttcggtcgccgcgtgggaggctgggtcctaggccgttggggcatggcaccggtctcatctgagagtgactcgcaagatccgacagactcatcgaacacgtctgtgacatcgtcttctgcgtttgagcccaaacctcgtgacccgctagctcaccgcttcagattcccaggtgtgaatcagaagggcccgataatgggcttgcgccctccacctgctgctccaatctctattcatgcagaaagcatagacgagaatctgctgcgagagagtctagctgaagagaatagctagattcctcgcggtctaaatatctgcacatccattgttttttagcgtttacactcgttttaatcttgcatttacttttcttttgtttacttgtgcatcctcgttcggttgttgcatttcttggattcctggtttgggatggcgcgagttgcgatgatacccatgctttcgtctttggtttcctagaattatctatattatacgatgtacactctttggtcattttcacaatgtgtattttgcaacaggatcctgtagcttagagtggtttttctcggtgtcttttatgcttatttttgaaggattttgataggggactgatatatacacttcgtcgagtgcctcgagacagttggagttttattcgtcaagataatcaacttgaacagtttcgcatggagttcccttggagctggttatatactgtgacaacaagtttcatgcaataactaacttttgaatgatttgcatgatatcaccttccctattcatactcatggcctcgtgatgtaaactcagttcaagttgcttatttcgaccgcgaaatccgatatgtccggagcgggatgctggtcgaatggaagaaacccgtctggtcttctgctggtgtcgattcgaatgggagggcctcaaaagcgagtgagttggtttctgttgatgtttagttgcgtaaggcatgaccatcaacgtccatgtatgaacttcaagactcaccacaggcatttagaaacgtgcggaaagtattttcattgcgcaggctaaccgcagtgatgaattcttcaatgttatagttctcaaaaagatcctgcacagtagacaggagtgagggaacaaggtcggtatcataaacctaggtatgtaagcaaaaaaacctaagtgaacagctcataaagacactcactagatcagcaccgagagcaacatcgaacttcagccctgtcccttcctcaccctcatcagagcccaacccagcaagatcccccaccttctccagcggagttccccactcccagacagcaggataaataggaatggattcacgcccatgcaaattatgcttgacacaagcacgaatattatcaacaagtgcgggctcacgatcagtagcaacaatagagcgcacaccaagatggcgtgcacaaagaaacgacaagaatcccgtgccagctcccagttcgataacgcgtttaccgcgcacaagagcctcgcccgcctcagacgccaggaacgaaccgaggtgcagagcagcctcccatgtccggttacctgtagttccagcgtacagaatcacgccgcgcgattcagaggtcgtgacggtacgcttgggacaatttcccgcgctggatgttggcgctgtgtacttgactaacgacagctgctgcgcttgctgcagggctgaaggtttcggctgtgagactagtgtgctccagctttccatgagatcatcgttgatctcctgtatttgggggagatcagaggttagataggtggaatcaaggaatataaaagtgggttttggttttgtattggtgtgaggtggatgtatatgggatagcaaaggaaaagataggaagttcaaaatgcaaaatagcataatacaaacaggtggacaggcatacatcctcctcggggttgataattgattcctcgatgcgtgatataagctgtttcagcactcggcttcggtatctgtccggtgggacggggaagactgcattttcgttgaacatgcgctcgtatagagctgtttgcacagctggctgaatcagcacagggcctggtgggaggtccagttgctggagctcaaccagctggaagtattgcgccgctaatttatcaatagagtcggtcatgacggtcggatgaagactaatgaatgaatttgataccataggagatcgatattattggagcccggggaggagagtggatgagtcaggaatgagataagcaagggctgatcaatacattatgcctcaggcagaaaccgaattagtcatatacgcctgaggcaaatagctcaaacaggctagcgtctaccctagccgagcccacaccacacgaaaattgaaagttcgacatccccagtgaccccgtcgacacttcctccatccaacgcacacaccaaaatggccgactctcccgtcactctgcggactcgcaagttcatccgcaaccctctgcttgcccgcaagcagatggtcgtgtaagaacccccctgattttccccctcgtattggatctgtgtgtgggaaatgcatcgcaggcgcgcaatatggaaattcgacaaccacccagcacaagagaaagagaaagagaaatacaatcggaccgccgcaacacacacagaatcaagcatcgaaaacccaaaagccagaaaaccccgatctgacatcttttcgcgaatatctagggacgtcctccaccccaaccgccccaacgtctccaaggacgagctccgtgagaagctggccgatctgtacaagtccaacaaggaccaggtctccgtcttcggtttccgcacacagtacggtggtggcaagagcaccggcttcgctctggtctacgactcctccgaggccctcaagaagttcgagcctcactaccgtctcgtccgtatcggtgccgccaacaagatcgagaaggcttcccgccagcagcgtatgtctttctcttcgtctctgcgattatcaatcgcaaactatgatggcatgtgcatttttgctaacctcctcctacaggcaagcaacggaagaaccgttccaagaagttccgcggtatcgccaaggtcaagggccccaagaagagcaaggattaaacgcctcatctgtaactattcgcacgattcaacatggaccgatgatgcggcatggcgcgatgggaaagattatggcggtggcggctttggctctggagtttcccacctggttatggcttgtctggacccaggtgcggtcggtcgtgtgtggggggagtggtttatcttccttttcagcgaacatcagactaaaacccaaaatgatgcccgttgaatggtgaagatcgtggatactcttttttcttcctgtgcttgttggagctggtgattcccgagaaaaaaaaaaggcctgacgatccccatggaaatctaaaacagggcgtcagtgttgtggttctctgtttgtatgttttttggggaggggatcatcagtcttcgtgaagacggccagggttatgagaatccgggcttcggctgtttgcccgggatgaaattacattttacttgtttctcttcactcggtctggcggtcttgtagactggacttgtatacggggccatgatgtctagatctagtgtagttggatttccagactgtaaagtgaagaacctctgccgtgtagtcgaggcttggtctatatcaagccatgccctccacgttatatgcttcaaatgcggagtacatacttgacacaacggacggttgatatggtaacagttaaccaccttcttgcctacatcaatgaatgccactactatatcaatactaaaaccaaaaagagtgaaataatcatggcagccccttggccaaaagcccaatctaattcctcaagaaccaaatttcccagtaagcattctaatcaaatttcgttatttcggagataaaatctgggaaaatactccgccaaagcattagttaggttacataggcaacttgaaagttattgtccgaggcgctaaagccctaattcagagcgaagtctcacactataacagcgaaattgcatctgatcattgcctggacaatccaacacttgtgattaattgtgattatagtcatggcactaactaactagctaggtatttatcccatccagatatatttcgtaagaaaaagacgtacctagttactagttagaagagaaccagtctttctatccgactcaaaaaaaagagttaaaaagccatacatacaatgcaggaacaaacttcctaaaccaaaccatcacatctagcaatgacaaggcctcgaagcaacacaaaccagccggcgggaggctgtgtaagtatatccctcgggttagatcgcttgtacgatgggacagattacacaacctagaacgaattccctttcctgaaatattcccatttagatttcatttcccatatggaaataccacttattaattccacgtggacttgtttcgtccgggatactagtcgtctgactcgatatgtagatacgcatctgctaccgtaggatttccgagccaaggacccagacacgtccatgtcagggttgtatacggcattctgggttggatcattgtatcactgcatccaagccaagggcggaagtcaggagtccgtcgatgtacagatttatgtgctattttctggttaagaaggatctcggagggcacatgggcacatggatagccctagcccgtgcttgtgactgttgaggatgggggacacatggggatggggttaattataagtactgctttatcaggggatctgattgtattaggtgctaggttgagatataaatacttgagtaagttgtaaaagacattactttcgaatagaccgtagaaggcaaataaggaacacgcttggaaggattgctagaagacagaagactagaatcaacaagctctcccaagtcattcgtctggttgaaacacatatcacgggcagtggagagtttctcatagtaacaatagaaagtcatttcacgaaagactaaacacacatggcatgaaaacaaaagcatatttttgcaacagaaactgatccacagatatgaacactgcataaagccactcggtggtattagggagtaatcttgatgggtgtgacaggatggatatctcatcataatcccccattggatgttttttttcttcttttggatgaacacaggcaaaataaaaaaagaggacagaacgagcaataaaccaaaataggacagaaacatatttcataaacagacgcgagaaagacattaagtgtgggcggaaaaaaggcagatgtaaacggccttgatatgggtatctcttttgtgtatcttgtgggaaagaaagaaacgaccaagagaccgaccaggaaagagaataggaagcagcgaagaccaaagaataaacaatcaaagcccaagaattcgatgggcaagtataacagcgatacaatgacactaatgacatattgaactcaactcaatatgctccctgatgtcccagcggtggaacaggagaacgatggagactatcaagcgatcgcccataatcagacaaatcttcagctaaaaaatcacagggcagaccaaccgtcgagtccacatgtcgaacgcggttgtatggcaaaccattaacaagcgtcggccccgagcagcacacctcggtctcggcaaccctcgacttcctgcgatcaccgcccacatacccatacacatcggggctgcaattggaattcatcacgacaagacgacgtcctaagccgctatcacgggagaaattgcgtcccatacgtggatcgggcgtgttgtactcgcccacgagagttccctctatcatttccagggccgggtaaggggggtttgcagcggagggggccatggagcatggggctaaaggaataggggagtggccgtccgcagttgacatggggacgtatccgaagaggtcgggtgttcccgcgtctgagtcgcttgacttaatgcgtgttggggggttaacgttgtagccaccgtttcctgggatggtgtgcattggtactgtgcggccgtctggggagggtgcgtaccgcgagttccagctctttacgtctgaggctagggtcatacctgagaggccatctggcagggttgagaggttgatgtttggctgcagctggggttggcttcggcaggttgggggtgttgggagggtgcggtctacggcatccgtgtaggacactgtcattgcccctgttgattggggcatgtcgggggatatgtcttggcctgagaggacgaagccatatgcagcatggttgctttgttcttcgaagaactcgccgttgggtctaccattgagatcccaggcgcggttgctccatgccgcggtgccatagtcgagcattgctcccgaaacgctaggcataatatacccgtgcgatgtctggccatggtagtgggctgactgattgtcataaacgtggtccatgccgacgtgttgccgggagaagttggagtggatatccagctcgtattcttctcgctggtatggaacccgaatttgaggggagcccatgaggattgaccttcccccacccttggttccataaaatctagctgcttctctagcagcgtcttcgggggccaaagagttgacctatcaaaagaaaaccaggtcagtgtgactctttcgctgtagatattgtggactcaagactcactcgtatgtactggcattcggtagctccaacactacggcagctggagcaggcaagcccattgttgaggtcaccgttgcacttgatctttcgctttcggcatcgattgcactagtggaggagggttagaagtggccgggtgatcaagatggagagaacacttactgccactagggctcgctttctctgtttccgtggcttttcctctcgctctacgagagtagagcgctcctgtttggccacacgcattgaccgagccatagaaatggtcgagttgcgtcggacttggtctagtccgggcatgtggtcgtatgtgtgatccattgatatagcaaagaacaataacccgttcgctgctcagcagagtagagaagattcaaaggaaaagggcactgcgaatgcctataagtgtttatgaaaagaagaaatagaaaagtagagaatgaaggatgtctctgggaaatagggctagatttaagccatgttttggtaacaatcggtgtgattgattgccttccttttttttcataatatcgacatgatgcgatatttttgccccctgcctttttctctatctatgttttattattattctatatatgctggctgtgtgtttagatccatttgggtagagcgaagacatacaaagtacataggccaaaagtaccctggacctggtgtcttttcttttctttttccttttcttattccttatttctcactttttatttctcttattttaccatctcgtatctctattctattattctatttttttctaaggggaaaatgatatgcaaagttccgcttgcccagatttcccccagctacccccatatatgaaagacagaaaatgtccccggcgttttaaaaagaggtttcacaaggtaacgtcacacggacatgaccagatagccatgacgagaacaaagtgctccggtaggtagtgtttcagccaatttgaaggcttctttcttttcttttttttcgtcatgtctggaagaggaagtagtaagatcctcaaacttggtgtatctcatcttccaagagatagagaaaacgggcaactgccgagctactgtttgcagatactgcgggggagaatgtcccgacgtcccgtggaaaatgtttgctcgatagttctgtatagctgcaggtcaaaatagcccgttctgaactcggacatcgtcgaggtctggaacatatacctagtcttgctatcttgcaaacgcacgtcctagagaaataaataaaaaataatatcaaaaggagaacaaacgcctgtcttaggatgctccaaatgtctcaatagagaaagagaagagggggaaaaagaaaatataggcaaaatctctctcatgacacctgtcaactttgacaagcgcacgagttggccccgagccaagcgcgctctagaaaagtccagggatcaacgatcgaaaacgctgatcggcgacatggggggcgattcagcgttctttagcgcttccggcacgcagctagatcgaaatggaaggggggaaaaaagcaaatcaggcccataaaatgagaatagtccgctgtacttacccagtgtatgtaagtacgcttgtgttatccataccagatcttgatcatgatcgacgctaaagctaaagactaaaaggggatctagaagtactgaaatgcatgaacatctaggacacttgcaaggttcgcacattgctacttggagctgatgtggagagaaatgggtatgacatggggcagataattagaaggggtttctccaagattagtatagtaaaccctagttctaactcgtccaccttgagacattcggtgacaggacacgacaagagacatagagaaagagaaagagaaaccaaaaacagtggggaaggcaatcaaagtctgggtttcaaatacaaatctagacctggagtctccagcaggtgtttagacaagttccggcagttcaaggtttgacgatgcacgacatccggggggaagtaggaattgcgaagagttaggagaaacaagccctagctacgccagctgactctaagtcggctcgccaggaacatatgttgggattgagactggcttttgttgcagacgatacggtggaggcaacccctggctgctgaccgtagctgcctagatcgagagagggcaagtggctgggctgggtaagcggctgattcacgattgatcatatcctaccccacgtgtgtgcttcgttcccagaagttgatgtatggtcatagtgatgatacccgttggatcatgatgcaggaggccgcccgtttccccttcccaccgtttctgctgtggaacggctcacgggggaagctggtgctgtcctagtaataggaggaccgtgtacttcctgtggaagctgcgagacggtgccatgatcttagtggggaaagagatacataaaagacaagacagcacaacagggtgtggcttggtcttcccaggatttggccagtgacaagtcagttacttgccaagaagagatgcttcttttggttgggcctgctggtgcatgagggatataagcacgcaaacagttcaaacctagaatctcagaatcccagggtcgatcaaggcccttaataagatccgctgcacgtcgatctcaaaagcgtaaggttatatccattatggcccaacgcggacattcggaagatatgccgctcgattgacaagcatcgtttcacaagtctcccgggtcgatcatccggagagccctagagctgttgcgcagcacgcacccgtcggtagattcgtgcaagaatccttttattggaaaaatcgggagagaagagaaaagcaaagaaaagacaacactgcaagaggctcagttccctccggttggggatccccgcgggcggtgattggtcgaagctccgacgatcttctctcgtgcatttcgcatttctcgggcttttacattctctccctacacctcttcatacctctctcatttcgaaattagtttgccctccaaggttctcgtccaagcgcctaattcggtatcttacacccgattccccgccatgagcgcgctcttagagacctccctaggcgacattgtaattgacctgttggtcgatgatgcacccaaggcgtgtgacaagtgagtggctccattccttggctttcccagtctgctgaacctgaaactaagctcattttgtgtgcttttagcttcttgaagctatgcaagctcaagtactacaatttctcgcccatccatagcgtccaaaagaacttcaccttccagaccggcgacccgctcggccctgatgcacctgagagtgatggaggatcttcggtttggggtctgctggatggaccgtcgaaaagaacatttccgctccaggcgtcgcgcacgttgaaacacttggagcgcggcacggtgagtatggcgacggtaccggcgaagaacgaccccgaccaacggctagccgccagtcaattcatcattacacttggagacaatctagattatttagatggcaaggccgtgattttcggcaaggtcgtcgagggcttcgatgtcctagagaaaatcaatgagtccttcattgacgaccgaggtcgaccgctgaaggatattcgcatccgtcacaccactgtgcttgatgatccctttgatgacccaccgaatctagttgaaccacctgaaagcccggtgccctccaaggcccaattagccacggtcaggatcgcggacgatgaggacttggatgatgatatggatgaagaggctatggacaagctgcgtcgcgagcgtgaggctcgcgcgcaggcgctgacattggaaatggtgggagacttgccgttcgccgacgtcaagccgccagagaatattctttttgtctgcaagcttaacccggtcacacaaggtttgtcgcattcccacacggaaccgtgaaattatgctaaccgatgctagatgaggatctgaatcttattttcagccgctttggaactatattgtcttgcgaggtcattcgggacaagcgcactggtgacagtctacaatatgcctttattgaattcgaggaacagaaggcctgtgaacaggcctatttcaagatgcagggtgtattgattgatgatcaccggatacatgtggatttctcacagagtgtaagtgcacctcatcaccgctcatctcctccgaccaatatgctaatacatcccaggtatccaagttatccgaaagctggcgcaattccaccgtcaccaagcgccgacagagaggtggatttggtggtgttgccgaccttgaagcgaaacgacaataccgagagctagacgaggcgcccatagatgaggatgatgctagatatctgtttgacaaacgaaacaagaacaggggcgctccagctccgccccgcgaggctccgtcagaccgcactcgcggtcgtcgagatcgagggagtcgaagtccccgtcgtgaacaggatcgataccgtcgtcgatcctatagtcggagtccacagagggattcacgaagagattcacgaaaagaacgaagctacaatcatcgtggacgatagtagtcaaatatcccctattcaaataaacacaacttgcaccatacggagtacatatccactcaacttcgcccctgtaagccaaggccccgcttcagctagcctattaatttccagtgggcaggtctcactcggcgctcgctagcgactttcttgtatgggtagctcgttaatatttgcccttgtagatccctaaaaataaactggagcccactagacctcctaatagtctgggatatattattagcaaactggagtgtacggaggttcactaaaggtacttaatcagcttgagcttcaccccacgttttctaatttttagttacttttctccttccttctcttcctcattctcctcccaatttattctacttctctcaatctcaaaatatcctccaaaatggcaggcgtaatcaaagatgctatcaacaatgttcttggacacttccatggcaccactccagaggttccccgtgaaccctccgcggaagagttccaagcactacaaaagaaatacacagacgctggacaagggcatgtcttcacttttgtcgacgaattgacccccgtcgagaaatcacagctcttccaccagctgtccaactttgatcccgctcggatcaacgagctggccgacaaggccctcaaccctcctcctgccgagcagggaaccgtgaccctcgagcccctccccgaagtcgccacagcctccatcctcgactccgacccctcagatattcagcaatggtatgaagccggcctgaaggaggtggcagcgaacaaggtggccgtggtcttgatggctggtgggcagggtacccggctcggcagttctgcccccaagggctgcttcgatattggtttgctgagccagaagtccctattccagctgcaggctcagcgtattctcaagctgcagtctctcatcggcggtcaggatgtcgtcatcccttggtacattatgaccagtggtcctacacgcaaacccacagaggagttcttcgagaagaacaactacttcggtctcgacaagagcaatgttatgatcttcgagcagggtgttctgccttgtatctccaatgatggcaagattctgctcgagaccaagggcaaggtacgtagtatacaggcatagctcaaacgcgtgtaggaaatttgttgaccctgaaaataggccgctgtggctcctgatggaaacggtggaatctaccaggccctagtggtctccggtgtgcgggaggacatgcgccgtcgtggcatcgagcacatccacctctacggagtggacaactgccttgtcaaagtagctgacccagtattcattggctttgcagcctccaagaacgtcgacatcgcgaccaaggtggtgcgcaagcgcaatgctaccgagtccgtgggcctgatcctgttgaagaacggcaagcccgacgtggtcgagtactctgagattgacaaggagactgccgaggccaaggaccccaagcagcccgacgtcctcaagtaccgtgccgccaacattgtcaaccactactactccttccggttcctcgagtcgatcgagaactgggcgcatcagctgccccaccacgtggcacgcaagaagattgcctgtgtcgataccgcgactggtgacattgtcaagcctgagaagcctaacggcatcaagctggagcagttcgtctttgatgtgttccccatgacaccgctggataagtttgcctgccttgaggtgcaccgtcacgacgagttctcgcctttgaagaacgctcgtggtactggtgaggacgaccctgataccagccgcgcggatatcatggcccaaggccagcggtgggttgaggctgctggtgctattgtcattaccgatggcgaggccgttggtgttgaagtctctcctctgatcagctacgtatgtctctttttctctatatcatttccctggtcacaactaacatacattacagggcggcgagaacctggaattcctcaagggacgggaaattaaggcaccggctatcctggagcgggaagagtagatcagatgggatctaaccagtcggatctcgcggagatctcttttggaacgaagaaatgaattgcattgtgacactttttggagaatggatctactgaaagaatgtagggtaaggaattcgtagagtattcagagtactagtgttcaatatgagtagaacatagaggaggagatagaataccccgtacctacatacactagactgtgtatagaacgcctggagtagcaaagcgacgccttacgcaatacggaaaagcccgggagctaaagccgtttgacgagtttgtcctttttccacttttcctctcttctttgtgtgcattctcttatttaaaagaagttggagctgttgagagaggttattgaagttgttgagagtgtgagtttcttctatttcgtctttctgtctatttcttggctttttcttttctgtgtggttccctcgtgtcccacttttttttttcctcgagtgggctgtcagaacgtgcttgcttttctccaagggttctcaaaaagctgacaaaaagtgaccatttagatttttaccaggatttgaagagttaccgtgagggtgagtgagatctgagggtgtttattcgttcgccgagctcgtgctctcccccgccgatctacgtcttcccctctttcgcctgaaatttttgggattggcacgttatgcgattttgctggactcggacaacgtcggatataatatgcactggaattggagtccaaacaaggctcgacaacgcatgatggccagacaattcgactaccccggcaatgcaggggaagacgctgcttatcgacggagctataccaaaccataaacccggcaccgggctgacttgcgatggatagattaccgccagaatgatgttgtctcgtcgcgcatgctacaagtgtggcaccattggccactacgctggttagtatagctggagtgctatatctgggatcaaactaattcctcggtagaggtctgctcttccaccgagcgtctctgctataactgtgcgtgaatatctccccgagaggtcataaccttatcttacttggcgctaatttgttttatctcataggcaagcagcccggtatgttcaaccatgagtcataatactcaaaacaagcttctaagtcttcatataggccacgagtcgagcgcctgccctctgccccgtaccaccgagagtaagcgatcactcaatatcaactgtgctgccatcgcaggttgctaacaccatctagccaagcagtgctataactgccagggcctcggtcacgtccaggctgactgccctaccctgcgcctgaatggtggtgccaacagccgctgctacaactgcagccagcccggccaccttgccgtaagtttcatcccctaagcccaggtctgcaacctttgaggcggttactaactctactccagcgcaactgccccaaccccactgctcccggagctggtgctccccctaccggtcccgccgctggccgcggtgccggtggtgctcgtggcggtttccagggtggattccgcggtggattcagcggctacccccgcgccgcaacctgctacaagtgcggtggtcccaaccacttcgcacgtgactgccaggctcaggccatgaagtgctacgcctgcggcaagctcggccacatctcgcgtgactgcaccgcgcccaacggtggtcccctcagctccgccggtaaggtctgctacaagtgcgcccaggccggccacatctcccgcgactgccctaccaacgagggtgccgctgctcctctcgctgccgttgaggttacacccgttgctgctacccccgttgtggctgcccctgctgtggtcgctgttgagactgtcactgaggctaacgtccctactgcgactcctactactgcagtcgcttaagtgtgttcggtcctatctctccaccgtgcatttgctattgaagcaatgcctggagttccttttcttccttgattctgtactacggtcactttccctacacctcgatcggtcctttctctccgccttttcttcctttgcatatatttaaatcacaccccttgttttgggaacgaggtctggttctggaccttaaaaaacaacagcttttgatttccttttttcacccccttttggacgtttggaactcgttctttttttacttatttttttttatcaccctatcatgtatacgacgaacaaacagaaaaggttgtttttgtttttcgcgaagccctcgacttgatttctcaagtcttaacgattggcgtctgttgtctattctcatggattatctttcttggttttcgattgactcttggttgtggttttcccgaatggggccaaggagagaacgaggagatgaagtgtggcaatgagaggatatgttgaagctgaggggaattggattcggagaccgttgcaactggaaagaaagagagcttccagatgagaagagtcctgagaatatttcgagaaaaaaaaaggaaatgtctcaatcaccttgttcttgtagtgtatagatgtagtgcgctctgtgcttagtagctgtctaaacccgtgaccttgatcacccaggtcgagtcttttacacctcttgttcactctacaatctaccccatcagtcagcttcagatagccatccccaattgatccacatcaagatgccgggctcggttggaagtgatgaattcgacgatgacgaggtacagtaatcctcatacccacgcacgtcctagagctgccatctaaccaataaatgatctacaattgcaggccttcattctggacatcgacggcatccaggcccacggcattggcgcagccgacattaccaagctgaaggccaatggattctacactgttgctgtcagtcctcatcttcgcatagttcaagccaattccatccccaaacctaaccactcatccagtccgtccacggcgccacccgcaaaaccctcctaaagatcaaaggattcagtgaagtcaaggtcgagaaagtcaaagaagcaattcagaaatgcctccccacggcctcgggtttcatcacagcaatggaactccatcaccagcgcaagaaagtggtccgtatctcaaccggcagcaaacaattcgattcaatcctcaacgggtgagtgcaataccaatgcccctgtcaaactccatctaacccaatctaaccccaccagtggcttccaaagcatgagcatcagcgaagtcttcggcgaattccgctgcggcaaaacgcaactctcgcacacgatgtccgtaatcgcccaactacccaaggaagcaggcggggcctccggtagagtcgcctacattgacacagagggcacgttccgacctgagcgtattgcccaaatcgcagagcgattcggaatggaccccgacacggcgcaggagaatatttcctatgcgcgcgcgctgaacagcgagcaccaactcgagctgctgaacacgctttctcaggcgtttgcgggtggcgagtatcggttgcttgttatcgatagtatcatgaactgttttcgggttgattattgtgggcgtggagagttggcggatcggcagcagaagttgaatcagtttttgatgaagctggcgcatatggctgaaggtgggttgttttatatgtgtctttgctcttttggctgctttgctgattggtctgacttgcagagttcaatgtttgtgtcttgatggtgagtgcgatattttgtttctcgaggtcttgtggctcacgcttcagttcagacaaaccaagtccagagtgaccctggcgctagtgctctctttgctggagctgatggtcgcaagcccgttggtggacatgttcttgctcatgcttccactactcgtgtgctccttcggaagggtcgtggtgaagagcgagttgcgaagatccaggattctcctggtgagtacttcgatatagtccgggtgctaccactgttctaactttttctaagactgcgctgagcgtgaagcaatctatatcattaccaatggtgggatcaatgatcctgacaaggcttgagggtagggtcgagacgatgtatcgatgttgagggaaatgctctgcagtcacgattttcatgagatttcgtgatatctcaggttttattctgtggtgattttataccattaatcaatttataccatagagaataggttagaataccaactccaagttatgttcatgtcgatgtagttgaagccctaactaagaaattcaccgcctacaccgccgctctgacatcccggcaaaattctgtgccaagagcaaatctgcagaaaaagttcagctcaatcaacgcaacaatccagcgtcaaacctccattcaaaatgaagggtgaatccgtgcaggtagaagggtataccaccctacctgtgcagctcccaacaacccccctcttcccctatcctgcaacacactatctctacatccgaccacacgaaccccgaatcccagacccagattccacccgctccctcttcatcgtcaacgtcccaatcgacaccacagaagtccaccttcgacacctcttcggtgcgcaactcgccgcaggccgcgttgaaaaagtccaattcgaagatgtgcagaccaaaaagcgcacagcggtaacaaccacagaaaccaacctaactcaaaccaaaaagaagcgcaagcgcgtaactgccgatgactttgaacgccacctagacgacatcacgctcccttcaacctgggatcgcaaacttcaaaagagcggcgcccacgcagtcgtcatcttcgccgacaagcccagcatggagaccagcctgaaagccgccacgaaggcggccaagcggggcaccaccatcatctggggcgacagcctgccgaccaaccgcatccctgtcctcgggctaaaccggtacatcgcgcacgagcggatgcagtaccctgatcgggggacgctgctgcgggcggtgaatgagttcatgaccacgttcactcaggtgtctgaggtgcgcaagcgcgaggatcacaagcgtcttgctgtgccggacgaggatggattcgttactgtttcgcacgggccgaagttgaattctgcggcgagggaggaggagatgaaagagcttgttgagaagcagaagaagaaggctgagggactcgaggacttttatcggttccagtccagggagaagaggaaggagagacagaaccagttgcttaggcgctttgacgaggataagaagaagttggcggagattaaggcccggaaggggaagattcgagtaagttttctcttctttgttcacttgctccttggtccttgaggttttactgactttttatacagcctgagtaatctgttacatgatagcatggcgttatgggtgtcttttttcgctggcaagctaaaaggttcgagaggtgtcctatgtacatgtgagtttttaccttttctttgccttcttttatgctcgctcctatgatgaactcgctggggccatagtagcgaaacgcgtttgcccgctgttatgccatgactgcaaacaccagcatatctatatcttctcgccttctgaactggaatttcgtcttaccgggatttattgtgcttcttggtgtcgcatctgctaattgtgattcgaaacaggttcgatacatacatacctgttaccccaatatcaatagttcatgacccaattatatatgttcgagttttcgtatcatccatagccaactcgtagatgtctctaattccggatctcccgcacagaccaacgcttggcgttacatcccacctctgggaaacaggacgtcttatgggattgatagctctgccaaagtatagaactgtttaaaaacatcggagaataatggctacagtcagctgtattatttgatactactttcggcaaagtcacgttctccaagcctgtggcaaaagcttcacacgatatatcccgcatgatatatccagcaaaaatagctctatctcagtggcatacagcacctcatcggccattcttcgctcttttttcataaaacccccatcaagagtgagaatcttaatcattgaatctggcacattctatctatatcgaaagaaagccacaagatgtcccctgcctcagtcaaaaatgagcaagacagcgactccgactccgacgtcgagttcgaggatgtcccaatctccctcccaaacagacccagaaacagagaagacagaggaatcccgataaccatccccgcaaccccgcaaccacaatggactccaaccctatcactcccgccacagcgaagccaacccatcccctcgggctccgaggaagaagtccagctccgaggccacatcagcaccggcatagagagagtcacgtaccgcaaaatgaaatccgacatgggtatggacgcaccgggtacgcccgcctcagaacgcaggtataatggcttcaaagagctcgctgcagatgtggagggtcttattgatgcgctttgggcgtcggcaacacgtgagttttatatcttatacaacgtagaagtggattatattgttttatactatctttattgccttcctttttgacaccatctgctacattctaaccaattctgcccagcggcaatccaaaccgaagccctcataaccctagcaggcctaacccaaacctccctcccagccttccccttcgatgccccaccgactctaaacatcctatacaagctcgattccgtcttcgcagcactatgtacaggcacacacccactcaccggcgccgttctaccaggtgcacagctgggccactctctcgtgaccgagacgcagaaggttcggatccggagtttggcggagaggactagatatgaagtgttctcttgtttggagaagtcgaaagatggagttaatgctggtactgttaatactggcgggtatggatatggggatgacgaggacgaggatagtggcgacgaggtcgagccgtggatgttagaggccacgcgggtttatgagaagagtcttatgttgcttgcggagcaggatcccgaggtggacgcggggatggatgagttcaactgtttgtaatgtatattcaatcttgttgcctgatctaggtgtgcctatgcggctccaacattaaatagatgttggtgaagatgatatttttagaatggatctcttgccattacgtcggtgtacatatggtgcatacgaggcagacgctcaggccacacacaaaatagtgaccaagtagttcggagcacgtcccacaccaatttgcattacatacggcctctattgtcctaacattactacctatggacgcggatatttctagaaacttctagctaatgaaagaaaaaaatctgcaccgaaaaataaaaaacaaagagcctgtggggtccaggcaaaaaagtcggtcgattttattcactatacaaatgccgattggatcggtaatgaagtaatgaggtttacagtaagagttcccgtacctcgaattcaggtatcagtcacacccagtgttagcactctctttggccagaacagagcgaactaagtggatgtgagccctgaaagtgggggtcattggggccagctagtggcctgggtctgtgtagctcggggctgcaatggccagtagtaagtccgagaggctatagtttagatgtacatcgtgaatatacgatttcgttggctgtgctttgacctggccttttttgccacgtgaaagcgaagaaagtggtaactgtgtcatgacagaggggatataccaatagttgtatgtgcatatgctttggatgatatttccgatggtgggaacgagctgctttgtttccatggttcatactgtatattcaggtataatatgagattgtgttactgaactgagctataactagatatatattgtgggatgatgttgtagctgcctatataggtcgtttgcttagggctatactattccgtacaacaagaccagtttgccgtgtcttaccatgcaagggttggattagcttattttcatagagctgagcaggtgaacggaggggttagatctgaaacctaacatcccaccttaatgaatatcatcccttgcacgcaaccccttccacagtataaaacatacaatagagtaacatggtcgaaaccatgtcagtagagcatggttatgggtaattcaatcttagaaacgcgtcgcgtaccgcgtagagtgaaataagccaagcagatgaaatctctgctggtaaagcagtaattccaatacgagcggccccccaatcctggccaataagagcagaactttgcatggaaagtctcccatggttctgatggagcctttttttttctttctttctctttgatgtcttttttcctggtcctgttctttcatgaccggacgtgcgcggctgaggtattttgggaatacgaaggggaggaaaccagattgggaagtccttgcgtgcagcttagggcagtacaggacatggattagagaaccttgcttcgagaagattggattgggggctctctgtgacctctggtagaccttcagctccagggctgcagacagggtatctgggtgaccttgctgtattgtggaaatggaattaccgtacggggctgctggttccatggttctgtggcgtttgttctcttccaaggtttgtcttgcttattatgatattacatacagtagatcgggtgtggacatgctactagacaccatcatgtctatatccatgaacaccttagtatagccctagttttgcatataatacaagagatcagatcaaaccactgcctatgctaagatgtacggagtacccaacaggttactacctgatctgcttgtactcttactcagcatatgacgatgacgagggctcgggagaggcccacacagacctgaggagttgacaagtcacattgcgagggcggcgacaggtccttgcagatttcatgcattggggcttccggccccttgttcttctggctttcaccgaattttgttcacatttcttttttttttttccctgtggctgatcatgcggacaggtggaagaggtcgatcatcggcaacgaactttggatgcagacctcgggtcccagggtatgatgtatcatcttcaattctcccgggcttcccgggattctggtacgatgaagaatagtaagccccccgcatgactgatatcatgcatttttgacaggaatctggggacaggctggtatatataagtattctgtacggcgtacggagtagggtttgtacctgcctcaggtcaagagaggaaagagctctgatcgacaaaggcaaggcattctgcactaccggctacagtgtacaactagtagatatcatactgttgatactgatctatacacgcagttggatactagactcgacctactctgtactatttagtatgttgttggcgacatacttcaactctggaacggaacataccaataccctgtaatacacttaccataccgagactcacgtaatgcgtttcccacttcccctctctcttcatctcgcgagatttccaattcttcattttcttcttttccccctcctaccttcccctcccttttcttattgttcgaagatctcggtttcaattttctgtttagttatcgggagttctgcttttcctcccttgttgccgattactctttttttgcctcgcgcatttccagtgttttcccaggttttcctcaacatctaggtaagttgcttggtgttattctatcgcatgtcgcatcttggccccaagcctctttcctcgtttgaatgtaccccaaattctgtctgccccatatctatcagcagtccggcgcagcgcagcgcaaattagccctagatcgcaagcttctttgcagggttcacgattttagtatggcgacgccttcgccttgaccagcgcttcgggacatttgagccgattatccaccggtcgcacgcatctcaacctcaaaaacgtcgccaatatgaggaatcggtccgatctggatgtctgacttgcccgaaaactgtgctggattgagagggtggacggtcgcattcggacatgaaaccgggacgacggaaacggccgacgcatgatgatcgcctagcacccgagtggaagcaagtccattttcgtctcgcgcatccgattttcgccgttggattgttcgtcttcggcgactcctcaaagctagcatcgtgagatgcgatgcttcccgaagcactagtcttggcgatttccggcaccactttttttgaggctcagaatcatatatacgcccgaggaaccagccgcaaaaatgctgactacgcacttttttttcccttccgcatcgtttactcacttgcattgcttggttgcctttctctgctattcacctctcacttccttttctttactcgcgcatatgcagatctgcttcaatttcattgaaaattgatataatctgactttatatcttccctagcttttcacgcccgtctctttgcttggcttcgttacgacttgatctcacgccggtctttctttaacgactccacgaagttctagtcgctcagacatcttatattcttacgtcgactttccggactttgatcttgcaaccatgtcttacaacggctacgaaaacttccctcagcaggatcccgccgctgctggcgccccggctcccgttgacaccaacatgaccggccaggccgatccctccgccgctcagttccagggcccccctcctggtgagcccaactccgctcccgtcccccagcagggtgccgatggcaagaccaccctctggatgggtgagctcgagccctggatcgacgagaacttcatccgcaacctttggttccagatgggtgagcaggtcaacgtcaagatgatccgtgacaagttctctgggtaagactgcaattagaactttcatcccaaaattgtttctaatgtgggtagtaggagcaatgccggatactgtttcgtcgacttcgcttcccctgccgccgctgctaaggctctttccctgaacggaacccccatgcctaacaccaaccgcgtcttcaagctcaactgggcgaccggtggcggccttgctgatcgcaggtaagcgatgatctctttggttggttgcctcccggctctaaaaaactgacccgtcccagccgtgatgaccgtggccccgagtactcgatcttcgttggcgacctcggccccgaggtgaacgaatacgtcctcgtctccctcttccagagccgcttcccctcttgcaagtctgccaagatcatgaccgaccctatcagcggcatgtcccgcggttacggcttcgttcgcttctccgatgagaacgaccagcagcgtgctcttaccgagatgcagggtgtctactgtggcaaccgccccatgcgtatctccaccgctacccccaagaacaagggtcctggtgtcggtggtaacggcggtgccgccatgggtatgcccggtcccgctggcatgtaccctcccatgggtggccctcccatgcccttctacggtgctccccagcctatgaatcagtttacagaccccaacaacaccaccgtcttcgtcggtggtctgtccggctacgttaccgaggatgagctccgttctttcttccagggcttcggagaaatcacctacgtcaagatcccccccggaaagggttgtggtttcgtccaattcgtgcagcgccacgccgctgagatggctatcaaccagatgcagggctaccccatcggcaactcccgcgtgcgtctgagctggggccgctcccagaacaactccggccccgccggcagcccctaccgccctgctcccccgccgcctcccatgtacccctccatgggcatgcccccaacccaccagtatggcgggtttgcccccatgaaggtgagcgatcaccctggcagcccgatcccggatcaaatgtgaagcaggcggtcggctgacacactcttccagtaagcgtttccctttgattgaaagcaccagcaggagttatttgtgtcattccaacgatgattctattgtgtcataacaaattcgttccttggtttctgggccaaggctatagctcttgatgagcatttgtctcctgtgctacgcatttcctttttacgtgagcgctattaccttagcaagatctgagctttatcccctttctgatctgtcttgttcttatgtatctttccttttttcaccctctcttcgactctccccctttgcgccccgtcgtattttatttttctttatcttattttcgatgtgtctctgcccttatgctatttatgctatctgggtttcccgccactgggtctttgtctgcgtgtaatggaagtccgaattgtcctgcgcttctttttcccttatactccttgggcaggcattctgcgaaaagttccatttcccccaccgttaccacttttaccaccttatttcatttgttcctttttttttctttttttttttcttttcttcaagcagctaaattgaattattgttcgctttgagaatcttcgcgtcgtgcttctttttacccttgtttcttgttaagactgattgccggcttgtacaacacgctttttttcgtgcgcctcagcgtttgtcgattctaaattcctttgatcgtatgcaataatgtcctgtacgcttgtctggtattttgcattgcactactgccttcaagctctccatttcctggtattgtattgtcggcccttggcttctggatctacctataaacattgctcctgtggctggtcccataggtggaggtttcaatggactcgagcatatctggttgctctgttagctggtccctggtggttgtcttgctatattgctgtctgctgtctgctatcttgagagtctactgggttagggctgggatttggactggactgactctgagactactcttctggatcattgtaaatttcttaattcctgaatggaatgtatataggtatggctcttctatctttttttaatgcttgatattcgccggatgaccattggcaagtggacctcggaactgtacaatactcacatatatgaagtctacatacatccatacatgtacatagaaacattgggtgtacacctccagacgtcttatcaatatgtctatcgataagcatactgcctaccattatcgatgctataggagtgctactcaaggcaacaacgaccgtgttgattgtataccgccttgcacgacttcccataatttgtatacaccacccaagcaacttcgagatgatcagtccatccattctctttttaccactctccacagcatcatgcgctacagaaactgggatgtccttcttttccctggggcttcgaaggcccccatccaagagttcaagacacaatgttttgtgaccaaggacaaagactcgccctatctacagaatgctgtcttccttggccctcatgcacaccatcccgagccaggtgtttttaaccagctgccagtcctcacaacattcatcccaagtctacccaaagacagtccgttccaagtctcagttcacagttgggagaagccacgtcccagtgtccagattgagtccaatatggaaccagaggacgttttgctgttcgaggcacgggtcttcgttgatggggtctttgttgcgtgagtaacttacgatctatgtactctgatgcttggattaagctgatgtcttgcaggggtagtatctatccacagagaactagttggccacaggttatgggtatgttgcgcgcgcttgcttcggcacaacgcagttctaatatccccattgccttgcttggttttattattgaatagctactgacattcatttgccagatctgggctctagtatgcgattccttctttccctttgatttcaaattctcacagtccgaacagatcttgatcgagatggaaaccaagatgtccttcgatttcctcccttccatcctgagatactacaacagaagcattgggatgccggggattctcaaggtcgaatcaaggttatcatcgcagaaggtttctctcgccccaaccgctcacccccgttcgaacgatacaagcatgtcattgctttctctttccagcatgcaccactagatgtgctggaattctctgacattgcttggcccaatcccaacatgtggcttgctatgccgaacgcatcccggtatggatcggcggccagatatagtacccccagggcagttggcgatggcgcacatgggcattcgccaagcaaacctagcagatccgatcatcgaagtacgattacggccaacacgagcagccaatctagcagcaatgcagctacttacagcggtagtaccgcatcaacttacaatgcctggacccctcaccgtgggtttcccattccttccacacaatggaacggctatccacaagaacctcgatgggagccacaggaaacatacatcgtggaacctgtcatagacgccttcgttgatgatacagcttggcgacagcgtggtgctcgatcctctcgcgaggacatcccaatgccagactatacttccacgggatcgaacagcagccgggccatctccagcatgactgggatgagctacgaacacagcaagcagcccagcatcaattcatgtcttgacgatgagcaatacaatgagctgattgaagctctgacaccaacgaaggctcctccaatgggtacgcgcgcaccatctaatactccatccgctgtcgccgccgcgacatctgcctcaaagccttctgctgcagccgaagctcgatctgcaagctacaagacccgaagccgccgtgcatccgcactcagggagatttcacagtcaagcacccgtgatgtttcgggatcgagcgagcccaagaagaacttgactccatccaagatcggggcgtgtccaagcgagaaggtccggagcaaaaaggagacccagaaagaggccagccaggagacccctaaagcgcagtctaagggtaagtgtaaggggattgcgaacgaaaacagcaactccagggatgtcgagaatctacaggacgagaatgagtcggttttgtaggatcgcactggccatgatcatgatgcttttcagcttatacttacctaatcattcatttgttttagttcagtgacatgaagccggcatgtatcttttatgcgagcttcaaccaatgcactttttactacgaagtcgacaaatgtactgttttataaaaacttcaatcgataattttaccctatttcaagctgacaagtatactttattcgaatttggactaacactagttactatcacgaagagtctttatccggatctcgagcaataattcttccactatatgaagtactgttttatgcatgcaattcctgtactactgctactacttattcacacatgatataacaatagcagtagtatggtattggatacctggcattacatggtgtcataaggcggtttcaaacttcgtgccttctcaactgccttctcaactgcttgtttggtatgaagagtcactctaccaggcgactgtaaagtgacttcgctctctttcttcccctccctctctctcttccctatcatcgcctcttttcccatcttcgttcttcgctgccacacgtctcttcttcaccgcatcatatcttctctctttattgttcatgaacaccacggaccacaatatccagccaggataaggctgttcctggggtgtcccaggccaccaggcacccttcattcattactttcttcaggctcatcaccatgatgactgtcgcggtgtgtcctttagcataaatacatcactcaatacattcaaatttggattgggaggttctacttgattgcaaatgtaagaagaactctttcaaaacacgtagttggctatatagcattttgcactattcttgctacaacaccaataatggagggaaatatctcgaatacatacaaaaagaatatccggggagacatctcgggagactccaaaaaggtcttccaaggacgcgttataattgaccactttggcatgttccatagcataaagaccattaaaggcgcttgaactatcaagttcgaagtatttccctttgcttaatcaaataatatcaacaattctcaaaaaaaagagctatcgatggacaagtctagtgagagttcaaacaaatgttatgctcgtattgaactaccttcaacaccagagcctctataatgataatttcactacaaaaggaactcaaataaggaaaatatgattgattaagcttcattctatctaaagccagggagctgtccctagcgaaatggttcaaaaaagctttcagagacaggacaagcaagtgggggtcctacttgcatagtgtaagtatccgtctcatgacaagcgagattcaaagtacaatgaatcaagcttttaaaaatgccctcagagttctcttcatcgagcaagtaaccagagtgctgtctctgatggaaaagttccaaagatttgggttttgatggcgtctgtggccacccaaggattcagagaatccatgcatgtagtaggccctcagaattgtgtcttccttggaaccctgccctgtatcctccgcgcctcctttcctataccctccgcctcccatctcgtagaactttgtcataaccccggtgggtgactgttctatatcctccccctgtctgccatcggagtcctcctcctctgggacgaggccacgccgggtctcagatagcccatccttcactcccccaaagacgtgatgcactttcgcgcagtcagaggtcaagataccctcagagtcctcttcactgggcaaggtcacatgtccgctggaaggctgtgtcgaatgctgcttccagtgggaggccaggggaatggttgacggagggacctgtgaaaggggcaatttctgctatatatcgtctcatgagtacgcggggacttaccaatggccttttgtgagacacagaagactcacggccccgttgaggcatgcaagtgttagtgttggagagtgtaattggggagagaccgggacagaaaagactccagcctgaattccatgaacttcaggtgtgatagagagaacagcaaaaaacgcatgtctcgaaaatgaaaaatatagaagatgaaaacagacaaagtatgttcttcacaggagaggaaagaggaaagaggaaagaggaaagaggatgggatgggatgggtgatgaatggaggggggaagagaagaggaagagtagagagggaggtttgacaagggaagatgagagggaggagaaaaaagaaggaggaaggattttatatcagaagcctggcccgtccgactcccaattagggaaagtagcattatagcctcgcctactcccaatacagtacaacgatgacatggtgactgcgtattagacaatacctggagactgccaccttgaatcgacagctcatataggaattaaaatctgcattgtgaccaggccactaaattgacttgacttatactatcactatcatgccagcaggctgtctacatgtacacaaactccaagactggtggacggaggaaactatccatgtatgagttcgaatcaatattttgagaccaggaaaataacatgaaataaccataacgacatcgaaactcctggaatttgctaacagggaatatccaaatccaatatcaatccggtctcatcccatcaacacactaacaccgacagccacaagtagagtcgcgaaattcctagttcttttggttcctttttagatcagtgccatttttcctctggtcactcctatgtccggtttcagggataatatgggctggtcgggtggtacccgggtctgatctcaagagtataggcaaagtgtaaagagaagagaagaaaaagagaaaagaaaagagaaccacaggctatatagccagtgtgatagaagtagaggtagaaaaggcccactaccagtaatactggtgacaaaagagaaagggaaggaaaaaaagggggaaacggccggcatttgttggaagattgttcgagattgatcaaacgagagaagatgagtgacagaaaaaaaggaaatcgttggaaatgaaagtatgaaagtgcactggatcaaccgtagggaactggacttcatactgagaggtatcaacgttgcccgtacagacaaagccaagcaaggaattaagtaaccacatccacaagtaaaataatagtaataatagaaagaaaggaagagaagccaagaaaactcgtaggtcacagtgcactaatctcgaatacagaagagccccggccagaccaagcagtccctgctatcagttgaaggatgctggtttcctaggacgagcaagggaggggataggagaggatgcgatgaacaaggtacaccaacgccaatctcacgacagcacatgcgcagaaaacacatatccagataattgagagacaagaagaaaacataacaggtcgagtatccgcgaaaacgcactagagcaatgatcaaatgtacaaacaagggtatatcggaggtgaagcacctgaaggaccgttaagacttttacacgttcacaggccgtcaccagcacctgtttcaacaccatcggccgaataggacatgctgggatcgaacccaaatccagtagtgtcggcggcatccgtgttgaggaatgtgtcaaagtcaaagtgctccaggatgtttgggctttccagtgggccgaagtcgaggttgtatggcttgcatggagtcagtaaatgcatacttgtaggagacgaggtggaagaacatacatcaggaatactgaggtcagcgaaggattgctgttggtcagggggtggctgcaccatggtctgaggagcaggtgccgaggtcggctgtgatggttgagcttgcccgttcgctccattcgctccattcttgggattgaaagaattagggtgctgcggcgtgacgggggtcgatggagtcggtagctctgcagcttcggtggatggagttgcacctgcggctgcactggcagcagcagcagcagcttgcttcttgttaggtcgcttggatcaagttagcgaatgcaaagaccatagcaccaattgagagtatacaaaccttgcgggcgtccttggtttccttcttgcctttcggtgcagctttggtggcctgctgaggtgttggtggcgcgttcccagccgtctgcggtgacgctggctggccacgaccaacgttaggacccgtgacaggtggcgccgagggcggaggcatcgcgcttcgttcctgtggggtcccagcctggggctggttcgcaggtgaatgctgcggaggcatctgcggttgtcctggctgccattgtccactaggcatacgctggccggcattggccggaatcggctgacccatttgagctccagtgaaagcagggttagagctaggaggtcgcatattcgatccagggaagaactgagcccccatctctagtatcggaccaccgttgaggttcatggatccaggtgatccacgttgagacatgtcaccggcatttggcgacccgggaagtccagtcggaggtatcttgggcgtacctcgtttcatttggtcattaggattgggggatgtgcccgccctgctgcccggggaagcgcctggcggtaatattccttggccgggcatcgggggctggccgtcagaccgggcaatgctatcttgctcttgacgagccatcatcaagcggcgcttattctgctgttcaagcagcataagctgcatttgataatcttgaagagcatggttaccatgctgagtgccaggtgtctgtaaactaccgggtcggacctgggcgagttgaccgttcgcaccgtagtaatcaggaccaccagccataggatacattccttggccatccggcatcggcatcagatccgtctgattcgccattacaccgggattcatcatgccaccattcgggataccctgggaattcgatgctgagcgagagtgatgaagggccaagttttgagcatatacctgcatagatttctgttgcgcagcttgtccctggaactgctgaaattgggctggagtcattcccctctgcattccattctgcattccattctgcatcattatagcctgcgggttgggctgtccaggcattccttgtccctgtccacggccattcggtgccagctgctgtccgttgacagcgccttcaaggcgtgggcgtttcgacggcgaaggagcgttgtcggcagacgctggtgactgtggtcgatgtccacccatctccatatccggatcccgttgcatttgctgcatcatctgcaagtgctgggtcttttgatactgcgccagttgttgttgttgcgagctagaaataatctcatcagcacgtccacccccaactcaacagttcgcataggcaaggagatattcagatagagcatacagtccagtggtgttgttctgcagcactgttttctgcaggttaggaggcaccatgccattctgtctccggagctggttcatctggccgggcatcatgggttgctgcctcataaattgattgtgctgttgctctcgcagacgcataaagttctaaatttcaggattagtccatgatcaacatccccgaaggtgatcgactacgcacctggttgtgctgaagatattgcctaatatcactgctgtttcccttcttgcgttgagcccagaagaactcccaaaaaaggctgaaccaatcgaggaggaatgaggaggcactttcgttgggaagatttggacgagggagatcatctgggattttgatcttctcaccgtccttcccatcggtcatcatggcatcggggtccataccattgacatcaccatcacgccgatttccgggactcgtcttggggttgttgtcggtgttgagtttgatggattcatcttgcaagagagcgcgggcgcagtcatggtacccacgtttcaaaaagtaatcatagatatacgtgttgaggttgttgaccaagacttcggggttgttcatagcgccgtcgtttcgagaagccgtggatccgttgttgatcataggaactccacccacagggcccccagccccggggttcatcccgacgttcatttggttcatggtggcgaacggtgggactgcagccacccttgcctgcggtatcgtgagattttcaaatcggagatatgtaatttccgacgcgcgacctccgtttcaggctatcaagcctaacgcggggtgatagaagcgacgcgtggaaatggaggcggaagcaaagcgctgaccgctttcgaatgaatatccaagcctcgcaggctgagcaacgcgtgtgcgtaacggcgcaaaagaaacgggtatattatcgcagaatatgaggaatttcaagatcaccggtggcgtcttttcccgaagaaaccacgcgacagggtagaaacgagaggatggaggctcggaggcgcagatgtagtatgttcggtgtgtctctgactggagaaattgatgagcgcttgccagagcattaaacacttcaaacgaccaagtgcaagagtaagtgcgcagtctatacggggtggacgatgacggaggtacaaggaggcggaaaaagcgcacaagtgaggtggttggtatggggggcggcgccagacacccgatcgggcagaatcgcggataggagagtaccaaggccgtgtacaaagaaagagaaaacccaaggacaagaaacgaaaaaagggaacggattaagaatagaaaaggggagtctaagatatgtggatctcacagtgggaagatgaggacgggttcagtgagagagagccggggggacgtacattgacaggcgctgccctctgcgggagaatcgcttgttcggagcggatcaacctgatcggaggtcggggctggggatggcgctgtcaagcgtatttctgggaatgcaccgatctgataaccattgaatttgcggtcttcgacaaaggagaaacgggagtcaaggaattagcgaaatagaaatggggatagatatggaaatatggcgatttgaagagatcgagaagaataaaaaaaagggacgaaggaagggaaagtcagaagggtgatatgatacctgatgggccctgcgatggatcccagcgggagtctaaaaagtagggtaagccactatttcgcgaccaccacaaaggttagatatatcgaagatcgagcgatcgtagagaactgaacaaatcgattgaagaatcaattgctgtggaaaagtcgtgcctaggtagaggttgaagaaaagatggaaaggagggaaattcgatctgtaaagagttgaggggcggcggagatagtggtacggaaccggtatggcctcgcgtttgtgacatacagtacgtgacaaatacactgactcggatgttccgttgaccgctatttaggtgcccacgggaatttgtatgtactgagccgaactgcaggtttacgctgcaatacgtgtttggtaaaaaccatacagatcgagctcctgagcggcagattcgccaaggatctacacgtataaaaaagggaaaagggagatcatgcgatttcgatgaactgatcgcaacatgatctcaaaccttgccccaagcccggttctgctcagttcgaagttaactgtcagccccctatgccagtgataaatcgtgtggttcagcgcaggatacatcacaaagcctaatttgttgaaagacaggtgtacaaatagagtgattatcagaagcaataatgacgagtaagggcaaaatgaccaatccccctaaaaaagacataaccagtgaggaaccccagaacgcccattcttcaagtagtgtaaatgcacaagatctcacaaggtcattactcttcctccggtggcatctcatcctcgatgtatcgtacaagggagacccgcatctccgtggtatcatctccgcgtagcacgtcactgacaaagtgtgcctcgatctgcatttgaacctaaaagccgggtcagtgatcggacccgtaacaagggaacctaatccaattgaccacttaccatctccagggaccctcggaggacgccacacagaatgttagagaaccatagctcgtcctgagcccgcccatcatcgggaagctccacaaagtccgccaaagggttgtcttcaaaaataagggagaactgggtgttgtcactagtccagtttgtgactgtaggtgtgacgttcagaaagatcttgaagccaacctgatcggattgtcagccatcagagatacattgtctccatgtactaaagtaactcctaccttcgcgatcatatcagctgtctcccggaagttgacgcaacggccgacacctgacttggccaggaagtcttcaatgagtcgcattccaatattgtatcccatcttgtccaactgcttgttgacatcgtgatagttgctatcatagtcttggcataattgcgcgacaattgttccgtaggttaatgtgaccagctccgcgttgactttatcgactcttgttctgcgcatatgaagaaagccgattagttcggattcgaggacagggatatggcgaggtcaattgatcatcgctcttatatcccagtaagcgggcactagggcttactgacttccatattctgttcgaaggccattgattagtagaaggtccactggataaggcattgggagtccacctactcttctcctatccttgagttttttgtagacgacatcttcaggattatgctctgatagcccggcttgttggtaaaacagaaaaagaatgcggttcagatagccacaggtaaatgtgacagtgttgatcagggtgattgtggggagtccgtgattgttggagttgctgattgtacacggtcggggtacggcggacgaaactggccatgctaaactttgacttgattggtttctttcatccaccgccctctactccgccttataattgatagggatcttacctatgagtggggtaaattaccatgtcattttctgcccgacagaaataacccaagatgatcaagtctcaatggtcgctctcgtccgccggacacatccagctcaccgccgagcctaggtgggattatcgttattcccgcagcttctctgaacttttgctctccactgctttcgaggtcgcgattggtcaccaattaattctcctacctttccaaactcaccgaggtgcttgctgtgacaatgtctggtgaaaagcgccctgctccagagggcttcgggacctcgcaccagctcgtggtcaagcgaaacaaggccgccgaaaacgcaggaaccgagcttgtgaagggctcttcccaaaatggagctctcattcaatctgtatgcgccaagtctgccttcgaagctcaacgggctttcacggagaatagccagctaattttaatatacaggttcctcgcacaagtggtttggatgctcctatcatggaactcacaggtaagactctgtcgccaatttgtcgctataacacgcgctaataaaaggaacctactaggtcactctggtgaagtctttgcagtccgattcgatcctaccgcgcaacatatcgcatctggatccatggatcgttctatctgtatgtcctcgtcttgatccgggaatgcggccgccgaatacgttactgatggagattccttgaatagtactgtggaatacatatggacaatgcgaaaactacggccaattgacaggtcaccgaggagctgtgctggatcttcagtggtcgcgcgattcgcgggcactattctcagcatccgcagacatgacccttggaagctgggatgtggagaccggagaacgagtacgccgtcacgtggggcatgaggagatcatcaactgcctcgatatcagcaaaagaggacaggaacttttggtcagtggtagtgatgatgggtccatcggcatctgggatcctcggcagaaggatgctctggactacctccagaccgaactccccattaccgctgtagcattgtccgaagcgggtaatgagatctacagtggaggtattgacaatacaattcacgcctgggatattcggaagaaggccatagtctactcgatggccggacatacagataccatcacatcactacaaatctcgccagactcacagactttgctgtcaaactctcatgactccactgttcgcacatgggacattcgtcccttcgcccctaccaaccggcaagtgaagacctacgatggtgctcctgtcgggctagagaagaacctcatccgtgccagctgggatcccaagggtgagaagattgctgcaggcagtggtgatcgaagtgtggtcgtctgggagaccaaaactggtaaattgctgtataagcttcccggtcacaagggcactgtcaatgacgtgcgcttctctcccaatgatgagccaatcagtgagtatataccctgtttgcaagcaaatccacaatttctaacaaggtcacagtcgtttcttgctcctccgaccggaacctgatgcttggagagcttggcaaataaacatatatgataggtattaatgttttaatgaagatcagcgggcgtcgaattcattttttcaaacatgccatgtgcatccgttcccgatctagacgcggagaacggtcttattatcagagcttccagaggtcatgacttgtccggctattcatctggatctatgaattgtacaacaagaaccaaagtccaaaaatgctgctcttgaatatctctggttatctacaagaacattcttatgtggcctttgtattaggctgaccttggaatattttcattcattgtagacccgtggacgactacatgtatgcctttttccaatctctttgggcaaacgacgtaggtaaacctatcacgatctcctcccaatgcaccagattctcgacgagtctgcagaaactccttccccttggcacctcatcccaaaggctacagggaaaatggttcgcacgctgtggtacctgccatctagttttgtttcctctgtctccagtaaggcaagtgatgagtgtggtattgtcattttggcgactggtttaatccgtgtgtcttagttatacgagctttatttctaacatctgcaacgtagtccagcctacgctgtcatcctaggaccagcggaccgtggcttggatatttctctatcattgaagcattctgacgacttccatatctctgggcacagagagaactccatttcagcgcatcttctgctttacgtatatctatatggcatgagcaactcggttggtgagaaaatgatggtctcaagctggcctctcatgttgacgtcgcttaatcccaaatatacctgttgcatgtcttcttagggtctacctctgaaactacaatatcactgcatattctatagctaagtatagctggtatccatatctatatggtttatagtaggatagcacttgaagttcactccgtagagtaagactcaaaatgtaaatagacaaaaaggtatctaaattcaagatcgatcagtagactaattttataaacattccaaccttctacaagttgtatagacagtaactatagcatgcaagaagatgatgcaataagcgggaaaaaaacattccccagaggcttatctggccgaatcccccaacttcccactccactcgaacaagccgagggtgatcaccctattaaaccagtctcttttcagagaggcctgaaatagaaggccatctggcgccctatccatgatccctacggcgctcaggtctgctcgaagcgcacgcgacggaggcgatgttcaacctccgctccgcctacatggtggtctgggccatcctgttatggctcaccgtcgctcatggcatgcgagacagcctagtcaaagaactaaggtataatatatgctacccctggtcatctccgaaagccatctaaatccactaatacgcccctgtccttccgcagacaagaaactgagcgtatgttcttccatggcttcgagaactacctccaatacgcgtttcccgaagacgaattacgcgccctgacatgcggccctcttgttcgcgacgagaagaatccggagaataatgacgtgcttgggaattattctctgaccttgattgacagcttatcgacgctggccatcctatcctcgagcccggacagtggggagcaagccttggcacatttccaggatggtgtcgagagctttgttagactttatggtgatggctcggatggccctgctggtcagggtgaaaggtcgaggggatttgatctggatagcaaggtacaattgtttgaaactgtgattcggggactgggtatgttttcttttccctcccagcttattgatttgttgcatatgctcgatttccggcttttgtgtcctactgctaacttattccaggcggattgctcagtgcccatcttttcgccgtcggcgagctacccatcaccggatacgagccatcagaacgggaagtggcattcgctagcgcatgggataaaagcatgtttatgaaaagtgaccacggaattcaatggagcaatggctttgtctatgatggccaactgcttcggcttgctgtggatctggcccagcgattactccccgcattctatacggagactggtcttccctaccctcgggtcaacctgcgccacgggattccattctacgagaatgcgcctttaaatctcaaggtccgagattccgagggcaaacgcaaatcaaaaacggcggcatctgagccggctgagacttgtagcgccggtgcaggcagtctagtccttgaactgaccgttttgagccgactcaccggtgatgggcgatatgaggacttaggcaagagggcattttgggcagtctggaaccgccggagtgacatcggactgcttggatttggcattgatgtcgagtcggggaaatgggtgggaccatgggccggagtaagcacgattcttttgacaggtacaagcttagactaattggaagtagatcggcgccggcattgacagcttctacgagtatgccgtcaagacgtatgttctcctgtccgagggcgagcgtgtgcctttcgactccgacagcccttgggcagcattagactcgtactatgctcctctgacagactatcagcataccgccgatgccttccgacaagtttgggaagaatcgcataccgcgatcaatcgccacctattccgaggcgaaggttatcaacatccccatcttattgtaggggatgtgatcactggtgccacgcgggctttctggatcgatagcttgagcgctttctatccaggggttcttgccttggatggaaagctagatgaagctatccagattcatcttctgactaccgcaatctggacacgctactcgggcattcctgaacgatggaacgtggctactggtgacatcgataacggtatgccgtggtatggaggtcggcccgagttcatcgagtccaactactacatttatcgtgcaacccaagatccgtggtatctgcatgttggagagatggttctcagtgacctcaagcggcgttgctggaccaagtgtggttgggctggcattcggaatgttctgactggtgagctcattgaccggatggagagtttcttcattggggagacagccaaatacctatatctgctgtttgaccgggaccatccattgaacaagatcgatgccccttgggtttttaacaccgaaggccaccctcttatcatcccaagaaaaccggcatccgcggctcgccagcagcgaaccccatctcaaggccaggacatggccggcggagtatgtcaaattataccctctccattcttcggcgtgtcctccactgcatcccgaacagacatctttcatgctgccaacttggcacgcctggatctaatgcctgatcgaggagtggccgcaggtcctattttggaagactcgcctggacatcaaagtgtctttgtgtctgatctttcctcgccaaccaattacacattctacccgtggaccctgccacctcagctggtcccattcaacggcaccagcgcgcctatggccgttcggcccacgctcgacatttcattcccgtcacttccaggcggcgtaaacatgggacctggagcgttggaacgtgtccgagatggggtacttgtaaaaacaattggaggcctccgactaagtctggttcaggacgtacggttggaacccccgacggccacgactggggatgaggaagatgggtaccgggtgcaggtgatcaacaatgtgccattaggcaaagatgagaaggtatatctctctcgccaaatcacctttgatgtcgtcgatccctatgatccgaacttcacccgtgttcgcgacaatgccatgcttgacctcgtcattgacgttctcccagagccctctcgccgacgtaatgattcggctcatccacgagatgaaaattctcaaccagaaaatccacacccgccagaaccccgtctcggaggccacagcctcgcctcttctgtcaacgatgccgcaattgttgactccccagactcaacagtaagagccatgctgtcgtctctgatgcactcggtgtcatctttgcttcataccgaaaggaccgaacctgctccactcaggttgagtctccccgctgctatctctacaggcatcgggtccagcccgcttcccgatattgaagatgcagttaccatgtccttgctcggcggcccatctacagaccgcctgtcgtggtcaagtatatacttcgcgggcgagctctgcgacgagcgaattctccgtgatgtcgcccataaccacgaagtgctcgttatcaaacgtggcggctgcaccttctcagaaaagctccgcaatatccccgcataccgaccaacgcgatccgcgttgaagctaattgtcgtcgtctcatacgacgacattccaccacgcagcttccgcgagcagaagaaagagccaacgaatcaatccgggtctcgctctgccctcgccgctgtccgtgccgaatcgactctcgtccgtccacacctcgacgaagcgcaaatgacagccagtggcattccacgaaattacctcatcagcatggtcatggtcggcggcggagatgaaacatacgagctcctgcgccatgcaagcggcatcggagtcaagaggcgatatagcatgcgctctcgcggcgtcccgatcacgaacttacacattgtttgaatattcatcagatatactataccctattggaagactgtcggatcatttgtggcgtgtttgttttatgtttcgcagatatgcataattttagacttgaatatagtcaaacccagtttcacagagaattgaactggatgcatttggtgataatctacattcaaagtctcgacttactctccatctcaacctgaagcttcctccaagagtcaaccgccctcttagccgccgtctcaggactaatctgcccatccgtcatggtccgatggaaagtctccatagaaatccacccctcaaacccaacatcaacaatccacgccctagcaatatccacaacgggcaaataccccccaaactcaacctccaaagggaaaggcctggcatgcttcgaccaggtaaactccttcgcctcaccgggcagcgcccacggatgcgccaacgaataaggcggatcaaaccgctcggcatcagaaagctgcacatagaaaatcttctcccgcggacaatcgcgcacaaacctgcgcagcgaatcccgcagcttagtatccgcatccatctgcagtccgttcggagaggaattatcgccccacacacgagtcccttcgtggaaggtatccagacacagtccgaagttcggacggtcgacccgctgcacggtcgacagggcgtcttcccaggtggagcagtttgttccccatgacagcggctcgtaggcgattgatattactggcttgctggcgctggctaggtcggctagctgctggaggtcggatatgattgttttctcatcgcggctgcagtccgatgtgaagactgatggcacttgcaggtaggttgcgtgtagcagacgggcaatttcgagccagtgtgaggcgagagcgagcctttcttttagcggggttgttgcgccttcgtagttttcgaagggggctagggagaggacttcgacgtttgtttcctggcacagggcgtagatcttttgagctgcgtcgtggatggaaatgttttgggctttgctgtaggcgaggaggtcgttgtacactatttcaagtcctgcgatgccggcttgggatgcggcgcggattttgtggtcgaggaggtggcctgggtattggctcagggagatactggcgattgctagtttattggacaccattttgaagtttttttcaggaattgatattaaaacgttgacttgcttctatgaccgaactgatatatcgaattagggcggaactcggtttccggtatgtggaggattcgcaaatcgccaaccccgcaattggccattgagttattctagtcaggcattgggtggatgtatttatcggtcattaatgaccgaaagtgtgaaatagttgatcatcgccttgcaagagttgtcggttggaactagaaatccgggtacttaagccgatactgggataactacgatatgttggaatatatcttcaagctcgcaagcagcaaatatacaatacaaatttgatatagccattgattcatatctagcaaatacgtcaataacaaattcaactgcgatcatctcccataacccaaacccctcacaatatgaggctctgtctctatcaaagtttcacccccacgcagagtagtccaatcccgcctctatgaagaattgtctaagccacttattaatcctttcgtgtggacagataccactcttcacgccagacaatccctttgagaaatcgaaagtgtaggtatttctcacatgcaaagacctggactcggaacttgaaagccctctggtggattccttatatagtctcgtttcgattgcgacttttgcataaggatgactggtgacttcacaccggtgccagacactgaacgcgtaagaaggataaaggaaccctaggcggcatagtctttcgtgatcgttgcaagagatcgtagccgacaagggttcccggtctttgaatgcgattctgagacagggacatatatcggctaaccccgcatagggcacgcagatcacgccaccattgagtaagccacacctgcagcaattagttactctctttggggtgtttggggggtttgaatgcggagcttcggtgtagattcatacacatcacgcagcatttccagcgtttgtcttcgagttgtcgtagaagctggattcgagggttttttcggagctcgatgttgcggtatatcaatcgacgcccttctctcaggaccagaagtttcgcatggtctgggtctttggcctgaaggaataagacaaagaaggtatagagatctttataagtcagtgcaaggtagatttgctctagcgcggagagatggggagaaatacagacatatgaaggagggagatagagctatcaccatttgatatggaacgtggagcttgcgtttatgagataggtaacactaaatattgtacatagggcttaggcagtgaattctcgaagcaagactaatatatttcatagggaaactagcatatcaaggttatacataggaaagtcgttttcccttctgccatctacatagaaaaggatatctagaaaaaagactaaaaaggctaccataaggccaactagatctctcgtttgtaccctatcgagtaaaaagcaacctacggcaagcctataacatcgggatttggcctttaacatagttaccaagtgagtaaaaggaaagacgtgatggagatgggttccacttcatgtctccaaattcttgtagaactgaacggtaatatcaaccccccgcaatcggggctaagtatgtggtcatttactgtgaactctcttctctcctcccttcaacatataattgcacataacaataaccagcagctcatcaccatcaccaccagaaacaatgctccccaacccaaccacccttcaaccagcagaaagacacacccaagccccaatacctaccccaccaactacaaaaccaccccaatacccaaaatacctctacttcgcctacggctccaacctctccccagcccaaatgaaaacccgctgccgcataaatcctacccactccgctaccccactagcaatcgcagccctcccacactggcgctggctaatctgcgaagcgggctacgcaaacatcctgccaccacccggtctgcgcgttgcaaaccaagactccgagaccgcacataagattcccgtttccgggtccgaggataccgtctacggcgttctttaccagatggatgttggtgatgagcggattctggatggctatgagggggttgatacacgtgctgctgatgcggaggctggggatggtgtgtccgtttctattaggcccagggtgcagggcgatgggtcttataataagtggtttgttggagcggatgttgtgaaatggctggatggggcggaggggatcaaggcggggcttggggatggaaaggggaaggggaaggtgccggttttggtttatgttgatgagaactgtgttaggctttctgagcccaagtttgagtatatcgcgagaatgaatcgggctattcgggagtctgtggatttgggggttcctgtgggatgggtggaggaggttatgaggaagttcattcctgtggagtgaaatggtatagatttagatttagatttgagattgatcgatagattgataagatggatgtatttgatcatatcaatcattggccaggtccaattcctatagagctactctattaaaataagatgtaattagccagtgactgcaatctatacacaatcaagtcgcattgataaagctatttgtctatatttgggtattatccggccgggagctgcgccagccgtggcgggtgccgtcgaccagcgaaacgaacctccagactccaagttcgagtaaattgtttgattgggcggcccgggaggagcggatggtaaaacgctcaccgcaagatcgggtgtggtcgggcttttgaaaagattgggtcattataatcggcagtcgagatcgtcgcagaaagaatgattttttggggagcggtgtgtagaattaagcctggccagagaggagagtgtgaaccggcgcggggagcttgtcgcgtccgtgaaggaactccagctcgaggaggaagatgaaaccgaggacctcgccgcccatcttctggatcagctcaccggcggccttagcagagccacctaagaatagctattagtatgaagtatccaccgatggattcttgtcacataccagtagcgataatgtcatcaatgacgaggaccttctggccgggcttgatagaatcggcctgcatctggaagaaatcctggccatactccttttcgtatccctgagtctcacaaggaccggggagcttgccctgcttgcgcacggggacgaagctggcacccaggcgcagtgccaggctaggacccatcaggaagccacgggcctcgagaccgacaatgacatcgggcttctggttaccgtagttggcggcgacgtgaagttccagggagcgaatcagggcctcatgcagggaggggtcggcgaagatgggcaggatatcctcgaacaagattcccggagaggggaaatccgggaactggcgcagggcggcgcgcagtcttaccgtaagactggcgagttcggcggcgctggtggcatcggaggcggggagtccgactttggaggcatctgggagcgtggaggacattatgagagagaagagaagaaagaagaggggaaagaggagagggttggaggtaaaagggttaaaaaagaaaaagcccaaaaaacctttggaggggaaaaaaagaggaaatggtaaaattacagttgataagccgataatgggggggtttcgtgcccctcacagggcctagatcgttacttgttttttattttgatcttttttatatagaaactagatgttatatatatgtctatttggtttataacactagaatataccttatatgatctctatagtaaatgttggcatatccttctatcaaactacgggttctatacttccaggtacacaaaaatcagcggtcagatcccgccactaaggtaacttactgtcacgcaatggcatattattcttcttctagaaggtaagactactgtactactagtatacttactttactcgtacaaggggttggatatgggcccggcttggatctgcgagaccctaattgattatcccgtaaacctagtgctcagtcctctcgtcgccagggcacgaattgtgttggactaataccactcgatcgtcatccctgacaccgtgttccggttccccagtagcctagaccgttggactgcgacctagactttatggttactttgaaggtcccgaggtccaggggaggacagaaggcagggctgaactagggctaagaccgccagactaccaagggatcatcataaatgactcatggctccttgaccagactggagctttagaatcgcattggatcagaccatctcaccggatatgcgccgtatggccagccttgacacatcgtacggccatttcacctagccctagccaataggatctctcgcgccacgacgtgatctgaaactcatcacaatggctttactggaaagagacatgcgtgctgcatagcgggatgtctgttgtgcagatggtggggggatttgtccgttgtctgctccgcccctcgctttgactaggggaaaggaacaaaagtacgaggtaaaataaaacagaggaagtgcaggttactgtatactataggtcaaaaaggaaaaagggcaaaaaagaaatctcaggtttggttttaggaatagccgaacgcgggggtcgaacccgcagccttaagattaagagtcttacgctctaccgattgagctagcccggccgggctgttgaagagagcagcgaaacagtgctccatggacggaaacaaggtctttggtagaatatagacatgcaggtggcggtcttagcgcatcctgcagcccgttgagaagcataactgtatatgacactgtcatatagggttgtataactacttgaatgctattttaatttgattatactgtacctggtgttggtacatttgatggcaacgcaaacctcttcaataatctcttgtcagaaaatcatccgacatatataattaccctccccacactatcattccctctttccttccctaaggtgacggcgaaataatgctacataagactaaacagtaggagttcgaaattaatatagtcaaattgtgtttatttagctggaattattgggaaatataattgcaaaagatatatcaatctccaattgagcgtcgatctttcgaatctacaccaagtacagaataatatcccttagatacctcctaggtgagcagttgactgtccacagttatactttacttgacactataaattccatcatccaaagtcactcatagcctttatgttgtcacctatatgtacctgcatgtacctgcgtataccctatgcagtaatgctacatatacgtcccatgttgtacatcaaagtatactcggcggcccaagcctaaaacgggatagcccctcacatgaccagcacggaccacctcgcttcaagtttttccgttgtctccccatcgctataaatccgtcggtttccttcctttccatctcatgcttttaaagattgggagcctcaacaggccacttcgatttcagatgaattttttctgataccttgtaataaattcactcatgtcacccgccgtgattaccgagatgcagccggatctgcatcatgaccagctcgaggccgtgggcaaagccttcgatgcactcctactaaccgtgtatcggctgactcacagacaaaatgagctgttacagcacatggataatgtcttcaaagaggtaaattcacttctctcctcccttatgcttctgcatcctggtctcgcatgacgaagaaaagctctagatcaggagtcacttttgtggcgatgacggattaacatgtattatctgattgagaccatgactgccttgctgttatgcatttgacaagatgaacattgctaactttgtatcttgcagtacacagatgtgatagaaattctgcctcctcaagatagacatcgtgcatttgacgttcaaaacaagttgctcgctcagcaagaagaataccatcagggtctcgtacacagcaagcctcaagttatggaacaaccgttgaattccatggatgtaatcaagaccctcgttgcacatcaaaatgtagacgaaaatactttctccgctatcaagaatggagtcaaagggtgcaaatctctactccgttcccaagatagcctctcccaaatatcctccaactcgtgcatcctcgcgcaagcaccggctccagcaatcgcgctggagaaggacttcacaacgaatggcacccagggaaatctccactgccctttctcgaaaccgaataagatgcagagcacaaatggcagtgaggcccccagcgggaaaaactctgcgccgaagatccagatcgaagcttgcggccacgagcatctggaccccatcagggcggaactcgaagaacgacgctctagccacacaccatcagccccgtcatcaaagggaggatgccccgtctcccgatgccccatccgattcctcgatcagcactccccggaagaaatcgccgaatatgttgaacgacacaaacatgagatccctcgcagccacgctatttgtgtcaagcgctatcagcgaagcccgcaggatatgagacaactggacgccaaatacggcggcctgaccagcatgatcgctggcctaggtgtgaagcaccaagccttcctgccggaatgtaataccaatggtgaagcccgttcctcgcattctgcgtcgagtgaacgtgttgagaaatgggccgagaacgtggacctcagtacgcccattgtgcagaacgaggaaaacgaagagaagaacgaggagaataagaacgaggatgataaccgccagagtcactttgaccgccccctgcgtgaagtccgcgtgggtgaatccccgagcaggccttggggtatttcagtgcctgtcacacatttacctcctatctcagcgccggtctctggttcatctatcccaacgtcccccgaccctcaagccgacatacctgataaacccaccgatgccgaagtccttgctaagcctgccggtggctgtccattcggccacggtaaaccaaagcctgaagcagcaaagcccgaaatcgaaccacctcggactggggaaagtcctaaggacaatgatattacttcaccaaagaaatctggttgtccattcggccacaataaaccaaaagccgaagttctaaagcctgataccgaggccccctggaacggtgactggcccaagacctggcccaaggaccaggctgtcgcagatcgagtacctgcaccccaggcccatgtttccccaactgctcctgctcctgcgagcgaggactcgactacgaaacctggcattccctcaacattctcacccccctcccacgtcaccttcaatggccctgtcttcttcgggtactccgccgaagagactgccaaactattgcagcagttcggcaacctgggcaaatcatgaccgcgaagaaacttctttgtatagtatgaccatggaaggcgcaagcttttaacgcatcacgacgaaacgacttaatttttttagcaagcattgtcgttgtattacccaattgaacttgatttgatataaatttcaatccattttccgtaacagctttaataacaaaattcacaatgtaaaataaatgaatgacttcatcggagagcgtcgacgctccccgagggaaactcgcagagcggggcaccttcgtatcatcgcgaccttcataacttcctctctccccgatgctgcgaactacttctcgtcttctatctctatctcgaatcctccgtccttcaattccagtcagacctcaattctcttctcccataatgtctgccaacatgtccatcatctcctctaaggatgcctgccctcgtgagtcaagccccgccaactatggctcctcacctgcctcctagacagagaaaacagactcaattccagaaaaaaagaatcaaagaaaacaaagagcaatagctaactcacacatccttagctgccggcccttacgtacgtcgtccttccctctatctgcctccgcagctcaatctaccttgagagctagctacccctccacaccggaccaatctactccaaaacaccatttccacacctacacatattgtaaagactataagtgaaccatctaacaaacccaactacagtcccaggccatccgcgccaatggtcagatcttcgtctccggccagatccccgccgactcctccgccaacttggtcgagggcaacatcggtgcccagacacaggtttgctgcgataacatcaaggctatcctgaccgccgctggctctagcgtggacaagatcgtcaaggtcaatgtatgtgtttccctccaggctttgttactgtggtgtttctggactcggctttgctagggagaagtatacacaagatatgagaaggaggacgctttgctgatctttattcttttctcaggtcttcctgactgacatggccaacttcgctgagatgaatgctacttatgagaagttcttcgtccacaagcctgctcgtagctgtgttgctgttcaccagctgcccaagggtgtgcctgttgagattgagtgcattgctctggagtagatttgagaatctatttagttttggtcttacttctactcgagccatgaaaacaaatataaagacagtttagtataagaataaaaatgagaatgaattcgatcgaattatgttgcgaaaatcctcggggatatcttcatcttgattatttccatttccgatcccgtttctctcgaggaacatacatgcgcgagtacaagcagatgccaaattgggaatcataagagtcaagggttcatgcgtcatgacacagaatgcaagagacgaaggaaatggagaatagggaagcaaaaacacacaacattactggcttgatggatgaaaaaaaaaataagaaacataaacgtcaaaaggtaggaggggagagcttgatagacaagtgcacattcaccggccacgggacatgataccgctcatgcggcttccggcaccggccatcaggctctgtttcacgatagcatcggcggcggcggcggcagcaagtctttccttctgacggctacggtcgcggagatagccggcagcttcggggcgcatgcgaagaatgcgcaggatcatgtcgtcgttcggatcagcctgcgcctcccgtcgcttctcttccttggccttcttcatcgtgcctaggttgcgggaaagcatgatgctcttggcgcgacgggcagcaggaagaccaaagctgccgtagccggcacctgtggcgccgagatgaggaggtgcagaagtgcggttgcgggccgcttgttggcggttgacggtcgccgaggccatgcgttcggaggtgcggataaggtgctccgttggttcgaagtagaagaaattcactgactgaatttcgtggtatttgggcgatttcaggatatcgattgggacgccgtttgcttcgccggtttcgtcgtcaaccgcatggaagaagttcaatagtagcacgagccagcgtgatacgatgtcgacttcttggattgttaatggcttctgatgggagggtttatccgacaggggcggtacaagtagactctcgatagtagcgagcacttccttccataggcgagccatcaccatcttcatggcttctggtgtgagggttttgttcatgatggcgaagttgtcgttgaaataattgaacagaggagtcagtgcattttcgacatctgccggagtgggtccggcaggagctggctgtgctcgattgcgatttaagaagctcgagacactagatatactgattccgcgagagagcaaagacttcagtgttctccgggaaagacagtgactgatgtatgacgaaagcttctctgtgatctttcgagtcatatccctttccgttcgtttgagtgtacggaaagccttcccgaagtagaactggatgtcgtctcgctcgccttccatgctaactcggagcagaagccgaccctgggtatccaggtcgagccaatactcccttggcaagaagtcactaaagtgcacaggatctagcttgatcgacgtgcggccaacgtagtcgtgatcgcccactgcgtcccagtcccagatggtggcgataatgttcagagggccctgtgtggtgagatctactgcatcctcccatcggggattaagattgttgtagatgattcgggttttagcaattcgtttctgatactcgtccgtcaatacgacatatggatcgctgccaccaccaaggtcgcatgctttcaagtcctctgcctccactaccttgattgtaaagacataggtagtagacttgcggaccttcttaagctgcggtggagtattccttgcaatgacttcggcgcacgcgtcgacgttgatgtccttttcgagtttgtcgagctgagcaagtgcatactcaatattgttcagtttcacaagggactatggataatcttagccgcgatattttacccagttgaaatgaataagaacatacctcagaggagaattggaagggctcaattttatccttattcgtccaggtgtcttttgcgaactgcatcagtttttcctgggtggtttgattcaatgctgcctcctgctcgggagtaagacgatccatttcctgcgtgaacatcttctccaaggagtcacagtatgtcgccacacctttcccaattgaattagagagatgcgtcatgaacttcgcatattgaagatcatcgtcccactctagttgcaccatactttcaataacttggttgaaagatcggaaaatgtcaatgactgacacactgtgacgatcgtcttcaggcgcaagctctgttgttccacctgaacgaatggcaaatacatcttgttttgtagcttcgctgacccaatccatgatcttttgatcagtcagacgaagccatctccagacgaagtcctgaaggagactttccacatggaatgggaatggagcactgagctaagttagtaatttcacagaaatagcaggggagtccaggggcttactcctcatgggtgttatggaataaccgtctgatagtagcgaactgtttgtatagatcgaagccgtcgtcaattgcgatctcctcacccctcgcttttgcctgctcgataatcctaataaccatttcatgtgcatcctcggcgaacatagggaggacgttttggcacaaggtggtaaaggggttcacactaattgtaagttaggaactgatcagccaaacagacgggaaagagcgggaaagaggaacccaccccataatctccggatttttgcggtagcgtttttgaatctttagcgcaagttttgagattgcatctccaagttgaatgacatggtcaggatcccaggcctcttgttccacagggattatttcgctaagaaggctttgatactttgttgttgccttttcagcaagtccctcttgcacgtaagtgctgaaacgattgatgtcttcagggtcctcaatgtagttgggatccatctggatgtgggtgtcaagaatgtacataaccgggccgagtgggcgtggctttgcctcaaagcagtccatcatagcctcatatagctctcggagcaaagcctcatgaagtttagacagcagcatttgcatcgtttgaagatcctggatagtccatcgttgtcgatcaaaaaccgtggaagccacaaagctactgcgtctgcggttctcgcccgaaggcatttctttcacaaaagtaaatgccgagtcaagggtagtgagatcgatttcattatcgacaaatttagcctgaaccacctcaaggaacaacacgacccgggaaaaggctggaatccgccagcggagacatatctcattaagcagttccgtagactgcttcgatagcagtttcattgaagggacgtcagatgtagcctgcgtagcctcaagctcccggtcccgcagatcatgggtcaaagtctgagacaagatgtatttgtacaaagacctagggtcagacgggatgaatgtgtatgtatcggattcgtccgactcttcaagagaaagcccagtcaaatcaataggttgatcaatgacataagatgttctgtcagtccgaccagacgttgttcttgacaggtcgaggttttcgtggggactcgaattgaactgaggaatggatccgggagtgcttttggctaactcggggttggattgcatgattgcaagcatcatctgtgagagatcagggccttcgctctttttccagctatcataaccctcgtccgactcaaaatcatcccttgacaatgttttgtgtgtctgaaggtttaggtgggcttgataggtcttaaggtcctgcagggcggccttttcagtccaggcggacttgtacttatcgatttcggattgtgcctgggatgtggtcatcccaaagattttggccacatgttgcaccaggggcatatccttcacatcataactcaatgcgccaacactctccgtggtagatgtaggtccgttcgtttgcatgaggtcctgatcttgcaggagaagcttgttttctagcaccgtcaatcggttggccaattctgggcggtccttggaccactcgtgatctttcagggtgagcgcaaggagtcgaacaaaaagcgcaacgtgccgatcaaccatgagcttccagctgtcatcgtcttgctctttgcccttgcccagctctttgactgcgttggagtagaaaatcaggagcagatcttcagctcgtcggtccttctccatgcgttttcgaaaggaggcctccttcaggacgttgagaaagacagcgaatgtccgcaccaccaggtgatcttgatattccttccttttctccttccccatcaacactccagtcaaccgcttctccagctcggccacgaagccatggggaaccctggtgcttttcgagtctctgaccaaggagaaatcgctcattaaatcatgaatagaggtggctgatcgttttggccgcgccggcgcgacgggggcattctggatgcgacgagagcgagggtggaggagataggcaaggtaggcgacccgaatggcatggctgtatgccacgttggcatttacggggcggcgcctggatacagaggagttgcgcgaatggcgaccctcattttgaaggctgttaatccgtcggttgactcctcgggattgggtagatgctgtcgacatggagttgtcaattaaatccgtgaaacgttaggaggtgacagatagcgggggaccatggagaaagttgggaagcacttagcacccagaagaagcttttaaaagattcttttctttcagtccaaagtgaaaggccgccacaaagctgaggggtgaattgtttattgaagggggcgagtgagggggggaggtgaaacaaaaagctgccgaacgactgacgtacataggcatataggcagtcccgtcccaaaacaatgctatgtctcctctgactattctatgaggttattatggtaattttcttatttttcttttatatgcaagtgcttattgcatattgctagttcaaggaaacttgatccttgttctccctggatggggccacacttataacgctgcaagggtttccttgttatttgggaatatcaatattgacatcaagtcaaaagttacatctgaacagatatcaaggacaaggatatgcaaaagacatttaatttaaaaagacaaccccaaaggacatcatagtgttatctgaatataaagtccacaatgtcaaatgaatttcaatgcgatatatcgacccatacgacaaacacaaaagtgggttttaaaccaaattcattccgagcatgcgagcatgcggccggccttttcggggtttgatgaaacataggactggtgaatcgaccaccagtcctcaaagacgccgaagatagaaaatcgtactggtatttacacaaataaaaagagaaaccaggtctcaatcaccacttatcgccggacttgtgggcctaaatcaactggttagctctttgcccatgtaaaaggttcttgggatatcatgtccggtacatacaggcacagcattgggacctcccaactccttttccagaccatcgacgtaggccttaggaacactcggcttgtcagggtaggtaaggctgacaacaccaaccatgctaaagaaaacagcgacgaagcatccgaggtggaagaaacccttgccggccgagacgtggttgtattgctcgggactgaagacaccgaggatttcgttatcctcgtgcacgggttcgccgaagttgcgcttctcttgcgcatcccaccagccaccgtaggggtctctgtgtgcccgcttcaaagggggagggttggggtagttgttattctgttttgggggttaggttcccggatgccaagtagggaaacggcatctctgccatatggatgctatacctgtagagccatgtcatcctcaatagcacggagagctgggacctgggagaaagatgcgcggggagcaatagctcgcacggcaacttggggcaggcgccgggccaagatccgttgagacaacatctaagagaggaattggaggttagaaaggctggtacgtaattgaagaagataatatggatctaaagaaagagactcacagttatgctgaaagacaagcagcaaatcagttgtcagaaggcaagagagccaattgggtagagggggttgaatatcgatgatgaacggatggaggtttgcggaatgttgtggcctgaggcagacagtcacaagacttcaggcatccacgcgccggcgcgaccatgtaattgctcgcccgaaggaaaaaaaccactctccacgtattctcatcatctccgttgtttttccgtccccatccacgccacagcgccgataagcatgttaaacttcgtgtagtatctctactcgatagtccctatttgctgatgccaaaatcttttacgtcgactgcgtcattgttgggatagctggggtcacctgccgccaacggcccctgtcgtctgcgggtacaagtcatgcaaaacggcacctccaacggcccatcaccccaagatgaacgcgtaacgcctgtgtccgattccacacccctcaatgggtctgtaaatgaaaacctgtcagattccgccccccgcgaatcgattccttccgacccgaaagacgtcgaagctgttcatcaacccgaagaacccccatcgaagaaacgaagactcacggattcctcctcatcgcaacgttccactcccagaccaccatcgcctccttggaaaaaggctggctttgagggccccacatctttcctctctgaaggcaaacgtaggtcttcgcgaacgaacgctgtcccggtcgaattccaacctgggtcggagaagagacacacgcgggggattcagaacaagaatgttggcaggtccgctcgcgatggaagcaagccggctgcatcctcgccgctatcggtaacacagtcacgagccgacgtcaatggaaaatcgggtggaaaggccactgcaaatggatcgcctaggacggcgtcgcgcgcgacggccaacaagccgtcgcgtatctcacaaactccagcgccaaaaccaagtcattcacacaccaaatctcgcatctccgttaccattcctcgcccgtctggcgccaacgcgaacggcaccagctctcgctcgcttcgcgatcgcccatctctttcgaatgtatccaaggaggtcaatgtggattcaggtgaagtcaatatgaatgacaaggaaccggaacaaggaccagtgaaaattccaaaattgcgcattaaattgagcaagcccgttcttcctattcgacaccctggccacataccgcagaagaaacacacttctttcagagaatgggtataccaaaacgatacctcaaatatattgtcagaggacgaggctgcggtagaggcacgcaagagacatgaagttatgactgctgctgagcccggtggaccgttgagctcgcaagtctgctcggcatacatcacagaacagcaagaggaacctcccccacagtactcgcaccaggatcacttggtttcccacgcactatatttccagaagctcctcgacaaagaacacaaacgccaccggcaaacagccaaactgtttgcgcagtggtgtgctgacgcttatcggaaacgtcacaaggaccccgaagatattctacgcgagcaacaggaggagatgcgtggaaagcgcaagcagctatcaaaggatcttcagaagatgttcgacttgacccgtgccgatattgatcgggtccgcctagcacgctgggaagaagagcggaaaatggaagaccagcaggctcttgatcgcgctatcaaaaagtctactatgctcttcgagaagcgtcgatcggagattttgggtgaattgcctagcgatgctcttgtgacgagtgacgatgaggatggtgtatcaggcttctcatctggccccgacgaagaagacgagagtaacatgtcagattctgaatccggaaccgacgacgaggctaatgtggatgatgatgccaaattgactgcggaagagctccggctgaagtacgctaacttaccggctgacgactataccgaccggatgtctgtagcctcaggcagtacagcaatgaccaatcctaacgactccttggatcctgaatctcttttagacggcctcgattcacacctcaccccggaagataatcagttagacgatgttgattcagtgttgatggatgatagtgatgcctccacagatatggatgatgatatgggtgatagcgatgaagaggaagaagacataagtgaggaggagtcggatgaggatgatgagagccgatctggcttgctgggtttcttctcgaagaatgaaacccctataccaaaagagggcgatgaagcttcagctgtggaccacgaacaagatatcgatatcaaatcggcatcggagggtgaagatgacattgacttcgaagaagatgaagtatccttggttccaattggaccaactaccagcgagggcacgtcgatagaaggcacgcccttacatatcgccaatgcttccgaagcctctcctgctattggaggagaaacaccttccgttgataccccgatggcagaggggctcactgaagccgaagctgacgatgcagccactgctggtgtcgtacatgagttggagtctgtcaaaccagagaccaaagaggcaccttctgctgaaatcgcagatgacattgatcacccccaacatatggaagtagatcatgtccatgacggccgagcaagcagggatatgtccagtgagccatcgccgggaaccttcgcaacaaagccatcagagcccgaatcggtgtcatcgctcgagccgacaatcgaaaaggcattgcaaataagtcattcgcctgctctaggcttgcagacacccatccctcagatcctgcgtggtacactacgtgaatatcagcactacggattggattggcttgcgggtctctacaacaaccacatcaatggtatcctagcagacgagatgggtctaggcaaaacgatacaaactattgcccttcttgcccaccttgccacagaccatggtatctgggggccgcatttggtagtcgttcccaccagtgtcatgctcaactgggaaatggagttcaagaaatggtgcccggggttcaagatcatgacttactacggcaaccaagaagaacgcaaacagaaacgccgaggttggacggatgacaactcctggaacgtgctgattacgtcgtatcaactcgttctgcaggatcaaatgtctctcaaacgaaaggactggcactacatgattcttgacgaagcacacaacatcaagaacttccgctcacagcggtggcaagcgcttcttacgttcaaatcccgtgctagacttcttctaacgggtacgccactccagaacaatctcacggaactttggtctcttctgttcttcttgatgccttcagatggtaccaatggtggcgtggacgggtttgccgatttaaaggatttctctgaatggttccgccgcccggttgaacaaattctggagcatggcagggagactatggacgatgaggccaagggcgtgatcactaaacttcacaccgttctgcgcccgtaccttcttcgtcgactgaaggccgatgtcgagaagcaaatgcctggcaagtacgaacatgtggtctactgtaggctatcaaagcgtcagcgattcctttacgacggcttcatgtcgatggcccagaccaaagagacgctcgcgtctggaaacttcctctccatcatccactgtttgatgcaactccgtaaagtatgcaaccaccccgatctatttgaaacccgacccgtctccacctcctttgcgatgccacggtctgtgcctatggactttaagatcaaggaatccctcgttcgacgacgactgctttttgaacacccactcaccaagattgacttggatttcctcaatctcgcacccgtatcacgagaagatatctcacgacggctagccgacgacagtatcaggctgatggctattggcccgttcaagactctccgagaacgccagtacaaccgaaccaactgggagatgggttttgatgggtccaacatgcagaccatcttagagtccttggagaatgcctgtcggaagaggcgaatggctgaattagagaggtgtctctacttcgaatccaagcggcatggtcgtcggcccgtatacggcagtagcctcattgaattcctccgggctggaaccaaggaacacgcgctatctaatgcaccactgcggaagcgctcaatggccgactggctgtcaagccggtcctctgttctcgcgtcgatgattctcactgttgaagaacgcgctcgtgagatgcatggctatgtccagagatttgcctgcgtcacccccgctgctgtggccgcgggcatgaatgaggctgccttgactccagtcgagaccaggcttttgacgaataatcgcccaaaccccccatacgatcctttccatgaagcacggatgcgcctctctattgcgttccccgataaaagattgcttcaatatgactgcggcaaattgcagcgccttgacaagctcctacgtgacctcaaagcgggcggccatcgagccttgatttttactcagatgaccaagatgcttgatatcctggaacaattcctcaatatccatggccatcggtatctccgactcgacggaactacgaaagtcgagtcccgacagatgcttacggaacgatttaatagtgatcctcgcatcctcgctttcatcctgtcgagtcgatctggtggtctcggtatcaatctcacgggcgccgacacggtcatcttctacgatctagactggaacccagccatggacaagcaatgccaggatcgctgccaccgcatcggtcaaacacgcgatgtccacatctaccgcttcgtatccgagtatactattgaatccaacatcctccgtaaagccaaccagaagcgcatgcttgacgacgtcatcatccaagaaggcgagttcaccacagactacttcaccaagcaagacgcggtcgaacccgacgcgcgcgacggccaagatgaagcaagtgccgccatggaccgagtccttggcaaccgtgtcgtcgggggaacccgcgtgttcgaagcagccgaggacaaggaggatttagacgcagccaagaatgcccagaaagaacaggagcacgccgacgatggtgactttgaggagcacagcgcctcgcacgggacaccggctcaggctggaacgcctttagccgtggaagatggggctggcgtgccggttccggagcacgtgtctgatgaccagctggctgcagaattgcagcctggccacatcgacgactatctcttgcgcttcatggagtggaacatgaaggatgaacccctggttctgccggcggataaaagcaagaaaaagtccaagaagggcaaggagcaccatctcaagaggcgtcgttagagttattgcgagatcaatgctcatttgcctcctttttggctccactccgcatgtttcacgtttcaatatttccctcacgttaacctgtttgtctctccggctatcagcttgttgtaatagtctctgtgtgtataatccaggcgttggcgatgttataatgttttatcattgtctttttttctcctgatcagctggctttattcataacttttaactctccttttcttttgctctactatttttttttctcccattctctgtgttaatcctactatattaacaaaagactcaatagaatcagttggcagaaataatcgtcacaaattactttcaaatcaatagtctatttcccggagattagacaagtggagcagaaatccttcctgggtctgcataggcagatcattttgttctgaccatataaaccttggatatttcggaggcgattagggtttagctcggtgtttatattaatatcaatagtgtgagagccggggaattgtctattgtattatagattgtggtggagtagagaaacgggatgcaacaatagtgcatatggttctcctatgttgtacctcggagatgttagagtgtagatcgaagatgtagatgtgaatatagattgtagtacaatgataatatactccatatatgcatccacagatctatcaagttgaagagaacaaggtcatctatggaacagaaatagggtttcccctattctcccgtctgatatcttcctccaacgagggtgcatggcccggtcgatccccctcaaagccaagtcacacctatctcggcaggttttctccgaacaaggataatattgaacaagggcgaccgcgtggttgaaggcagccatggaaagcaggaagtggagcctcattcggcagttaagggatacatctcggatacgattactttttgcacatctcgacggaagtgaaacagtgacacaaggttgacaatgttgccgagtattccccggttgtggacgttgatttgacgtgatttcacgtgttggagtccttggacttgttggagtcgggctccactgatcttctctccaaaagtctcccgaactcggaatggaattggcaactgtagggctttcgagctccgtactctattaagctttggagagtgcctcgttggaggtgcagcagatccatggtgatccggggatctgtgatttagtacatcctaaacctgatatatccctgtcatccggattaggtgattggtactttgaaatgccgtggatcgagatatatggcatttcgtgattggacggggaagaggaatggaaaaaaataaaacaaagagaatcagatgaaaatatgccgggcttttacagggcccataacccagcgaggtatttcaagcagtattttctttgtacaacatagggaggaggcggctgtagacacgtcaaagaagtgatcgccatttttagcttgcggatgagcaaatgccgatgtatccctgtgttggatctggtcttattgcccagtttgggaaggtagtatggaatatatcataaaacaaagaaatgatttctcgtatccaggagacttctagtcggcatttctccatggattctcattcccgagggataagaagctcccatgggttaaggatcctgaaccaacagccgaagccggacatctgcagttcgagagagatggacgtgacatatgcaggtcgaagaaacgcaagtgatgattggcacagactcgtgggacttttcatgcagctcgggcccgtgcattttctgatcctcgtcacgtcaaaatgtctctcatattctctcaatctcacgactagatgtaatagtgccatgggagatcccgtctaaggggggagaaactcaggatggcaccaacatggagcccaatattccactatgtattgaggacccgggaagatcgtcgccgatcaatttgccagatcgataggcgcttccacgaactggtactccacgggcgtcaaatcattggtgtgaggcaagaggggctttacactagttctgacaccatgtgccttagcggattcacctccggccgtaaaaaaagaaagcgctgctgccttgggatctgggggaggagatacgttcgaatagtgttggatctgaatgatgtgatgatcccgccctcctcgaattgaatttgcagcacataggttctaattgacaagggattcgaagttctcaacggtgctgcctctggataagacatctggtgtagaaatgtaatcgtcagtctatccatggaggatcccgaggtggcggtgatcggcgaccatgaggtccaagacgccatccgcgggtgagaggagggcttatctgggttggagtatatgaccgtattaggataaaactggggccggctagggccccaatgcacagtaaatcactcctggggaactataggccgtgttgtctttgcataaccgttgcgttgggatttcccccctcgattatcgtcgggcatgatcgggccaagggaactaggatagcatatgtatctgtgtatcttctcgatagatcgaatgttggaataaagaaaaaaccacaccatagtcagctctgtacggagtacaccgtagagactgaggtgattcatcgaattccgatatccgctttgttcaaacgcgccaagcactcaactggggatagtcagacataacagatgagctgttccgcttggatgatatgatccactcgaagtaatgacatcgccctgatcgtcgagacccgtaaccaatgatgtttgcgctgcgaatctcgttgatgatcgccgcgtgctggacgccacggacgctaagacccaatggatttcccccaagagattgtgtgttttagggttccataatgacagaaccaagacaatggagatgtggaggtgagaggtggtgagagggaagcgggtgaagttgggagatgaccttatattttaatgttttattttatttccccctaagctattcccccatttctacatataatacttgtctcgcccgtttcctgtctcttttctgttgatcatctcgatcttcgtactattccccccttttccacttcccaattggactgtgcgtcaataatgaagacctctatctcgtccgaggtatgggagaagaagaaggcgttgatctccaagttgtatatggaagatgaatggcccttgaagcaggtcatcaaacagatccgcaccgacgacttcaatcccaggtgagtgcaccatgtccgataccggactctatcatgaactagttaactaacatctctagtgaaacccaactacgaagcagactgaagaaatggcgagtgaccaagccatcccgccagactcgaaagaagagtctggcttcggcagaagacttagactcagacaaggatgccaagcgcaaggcatccaccatccaaagaccactgccatcattatcaacgagagaaacacaagcccgccatgaatggcccatgatacaacccatctacgcacaacatcccaccctccaacaccccgtcccagaccgggaccggaaatggagctctcctatgatccaacaactcaccccaagcccctccggcgagcacatccaagaccgcacgacagccgtctcctatgccgagcatagtccaacaacaacacccttcgaccaaacccacacctccccagtcggggagggccttatgctgagcacaacccccgccgtggccccatcctacccagcctacccactctcacccgaatcgggccttccaagcccaggcacggccacgactcccagcagcattggctggtcgccccgtgctgtcccagttgactacggcctcaacccacctcagtggtactctctgccctttgaaaccatccctcccccggccgtctctcagtctccggctgctcccatggctccttccatcaatggatacctccctcatgtccagctctaccatcctcagtattaccacggcgaggcagagtacccccatgtctatgattccaagaactggaagcgcactatgtcgttgcaatatgatatggctggccatctggctgcccgggccgagcacggagataggaagctgatgctcccacagatgcagtctcatggccagtggcatcctatgtcaccgccgcctactcagtccggtgggcctcattccttgatgtgtgctccggtcatgccttatatgggccatgaccattatgtgcagaagcctccaggcattggatactaggtgctagcttgcactggcacccttctttctgttaaatatatatgatgttttgatacttttttttgtgtgaactatggtggtggttgtttgttttgtcatacccgatatgtttggttttggggagttgaaaaggaaactgtatatcttgatacctattgattaattgagcttgatgcatcttactgtgtatattctatactatacatatctatcaaatctacaaataaagcagatgttctatagatgccaagacctgtgagttacccgggaggaacctcggcatcttgcggggaagcccccccatatcccagccatagctctttttatttgtgacctcccctttcatctctttgctcaagaagtttagaaactgccaactaaatcccaatctacattctcactactgccaaaatgcgtgccgtccaagtcagcgaatatgtcaaagtacctataaccaacctcaacctcaactccaacccaaactaacaacatactacagggccccctagacctaaaagtaacgacagtcccaaccccgaccccaacacccgacaaatacctaatcgaaatccactcggccggcacaaacttcttcgacatcctccagatccaaggcaaataccaaaaccagccgccgctcccctggatcggcggcgccgcggtggccgnnnnnnnnnnnnnnnnnnnnnnnnnnnnnnnnnnnnnnnnnnnnnnnnnnnnnnnnnnnnnnnnnnnnnnnnnnnnnnnnnnnnnnnnnnnnnnnnnnnnnnnnnnnnnnnnnnnnnnnnnnnnnnnnnnnnnnnnnnnnnnnnnnnnnnnnnnnnnnnnnnnnnnnnnnnnnnnnnnnnnnnnnnnnnnnnnnnnnnnnnnnnnnnnnnnnnnnnnnnnnnnnccgggaccggcggcgccgaattcgctggaacagtcctcgccgttcccacctccccaaacaaccgctttagaatcggcgaccgcgtcttcggcgccacacaaggagcctacgcaacacacgtcctggccgcagagcaaacactcctccccgtgccggaggggtggagcttcgaagatgcagcggggctgttcgtcacggcgccaacctcgtatggcggtcttgttcagcgcgctggcgtgaaggccggggactgggtccttgttcatgctgctgcgggcggggttggacttgctgctgtgcagattgccaaggctatgggggcgactgtgattgctactgcggggacggagaggaagagggagattgctaaggtttttggggcggattatgtggttgattacactaataaggcgtggccggaggttgtgaaggggatttgcaaggagaagaggaagggaaatggggctgctggagtggatattgtttatgatcctgttgggatgattgaggcgagtttgaagtgtgtggcgtggaatgcgcggttgttggtcattgggtttgcggcgggcaagattgaaaaggtcgcgcttaatcgggtgctgttgaagaatgtgagtattgttggcttgcattgggggcagtatgccaagtttgagacggagactgttggtgaagtttggcggggaatctttgaccttgttaagcaggggaagttcaagggaacggcgttcaaggatgagagctttgttggattggagagtgtgcccagagctttgcaggcattgggtggaagggagacttggggcaaggttgttgtgaatattgttggtgatgcgaagagcaagctgtagtctggagcatccaggactacagtagatagatgtgggaaagcaatatattgattcaatatagatataaactgatgaatgtagatgcgcaaggagtcatgctctcgtagacaaagtaaaatccccaaagggaaagactcgagcaagtataacatgaactatgaaggccctttgcttgctctggcaactttcgtatttcagaagtgagcatgaacacccgaaggtacccagctcgcaatccagctccagtcggtcacggctacaagacgtagcgctgtggtaactgttctccagaaggagagcccttgagcatgtccatatggactgggacagctggattgaggagttgcggatgacagcacgtgtctggggtttgatatatatctgtggttgggttagtgtagagttttgtattgataggcaccataaatcagaataacattaaattcagagtaatggtttgaatgtcgaaagattgtcgagagaatgtctaggggaagttgacgaaaaaaagaggagaaaagggaaaataaatggcgatgactcagcatgtctataccgcccattttctgcctcttagaggatatctgcatggaaaatactccgtactatgggcacagtcgctattgttccaattccaaatgaaatggatcgttcttcactactaaacctcaatagaccttaaattcttttttggtcagctacagaaatttccactcttgtggaaatttcaaagtgcaggaactctactattagactatagtacaagaacacttcctggagaccaatgagaagtcattatgtgcagaacccttgctaaagttttttgaccaattgacggtcttttggaaccctttaggctactgacaagtaagctatgattagaccatttcagctgtagccaagatgtatataatagccacaactttccacaccgtctttcaccttctttcatatcacaccttagctcccacgattttatgagcctgtatcattgaaaatccaactttgaacaatatcaaagtcaacgatggtttgtgtagtcaagatcctggatgatcctgtcagggactcaatcacacaagtggacacgaacacatggcttatcggtcccttcaaactctatcgatcaaagggatattccgatacatctacctggtacgaccaagaagacgatctcagttacactgtcaccaacgcacctatcggatctcattggtgtatgatgctggggatggctctgccgtctggtctgtaggaaacagcgcgttttgcaaggtcaaactatctgaaccgggtataacaccagaggcggcaatagcgttcgtcgataggctcgtctgtgagaagaagcctggtttcgaggtccctaagctcctataccaaacagaatacaaagaccggtattgtctgtttttaagcagagttcaaggtcgaactcttggagatgcttggccttccctagacgaaaaatggagacatcactacgcaaacgccgtagtggatgtgtgcaagtttctcgcgagtcaggaatgtgaggaatttcgtggtgtggacgggaagaacgcccttgagccttttctcgtcaaatccggcgcggaagaggaatactctcctgataatctccggcaatttgtatataaatgggtatggcctgctcaaaatttgtgttctaccatgccgacctcggtcctggcaacatcatagtggaggatatcccagaaactggcactatcgatgttattgattgggagcttgctagctattttccaaagggaatggattcgaaccaagtttcgactaagcagtggaatctttcttgaaaattcagctacggacaagccaactgagtggagatcaagggttagcgtgttgcttggagagaacgggttcgaagactatgcatcgcaatagttgtcccggtttaattgctagcgggactgccattctactatagacaagaataggtctgcatcaaatatcaaaccgggctttctcgcgcatgctcctgaagtcgtagctctcatagccacttgacaagtctcacggaatacatggggggtgtagatagtcagccgaaggcttgtaggtttgagttatatgtttccatagactaaagcaataagctgtctctacgtcatggatggataatattaaagcattcgaagactagcccctgaagacacgtccgcgtccctgcatcataagacaatgttaaagacggtgtccttgagaaggcgaaccgcctatacaaacttgaccaggaaattacggtcagtgtttcttaatgtgtagcagtcaatcaataagcaccccacaaagctactgagataccatctaaagaataaaactcatgggccgaggagcaaaaactctagggtatcttttggagtatcttttggagtataaagaagctacctcgacaccgacggaaccaggtaatcaaatcaccgagcgatgagacaagtcctgcttactcaactcgtagcaaataactacaggggtgcagtacaattgtcctacccaacaaagagtgaccaattgggtccttcttccaaaatccagagaacaagaacaacgttacttatatataaaacgaaaggatcagaactacgtcaaatccacatatacatacaagtcagtcaccacatgatcattttgcaggtaccaccatggcccatgaaaacatatggtttcccgatcctttccagaactgcaagatcttgagtctgaacgagcctacaccttccaactgggaagtctcccaaaagatcaacgggcatgtcgagcaatggaaagacgctacctgccgcctctcctctctggcctccgccaagttcgtctgtcgtgataccagtgaatctcccaatgggcccacagccatcctccgtatcgtgaagcagattccctctaccaaagctcaggtagccgaacaatatactccaaccgagctaaaagcatcccaagccatcttgctcaggaagccactcaatttactctacccgagctaatggcataccaatctcccaaggaaagaaattcgcccaacacccctaagctcctagcatggcagcaagggactcaggatgcctctggtaccatcccaggtggctttatcacatggattatctttgtggacattgagggaatcgcccttggcgatgcgaatggggctggcatatattgggagcagccgccggaaacacgtgcaaaaatccgcgaggtcttcatgaaggaatacacgtaagtcagccctataaaagtttccgtctaggaaaaaatttggttattcctgtttttggatccctcgacttggcccctatgcttgcgcatgcttgcgcatgcctcgttgaactcctgattcaaagctgtttattgaggaatgatactaatacataatgattagtgaagcctctgaaattggaatcctaccagtccatgatggcctggaaatttgatatggaacgaggagaggggaacgatgtaagtcttccattacacaatgcgaggatatgatgcggaccaggttgttaacatgttgtattcagtcatttcgtgggatttgaagacccagaattcttccagcgcaagggtcgggtgacagccaaaatattccctcgctataatctatctaagactccccctggtgaccggtggtgggaatatgaggtgaacaaagatccagatacctcgaaatggaccttctagtcaaactctttgtttggacatcggttgtcttcatattagcctcttcgttttcgttcttcggtgctgatgctcagagacttgaggtatcatgtgatatgagactattagggaaggcgcatttgagggcaagtgcctgttctaggaagggagtgggggtataaaagaacttctcccacctttcctcctcttctcttcttcccctccccatctctctgaccaccatctctccgtagccccatgagacagcgtaggcagagggtgccgtagcacatgctgcttaacctaccacagggatcataacattaccatgtttgttatgaggtctatgtaggtctgcatcaaataacaaaccgagctttctcgtggaagttcctgaagtcgtggctctcattgccatttgacaagtcccacggaatacatgtagatagccataaccgagtactcttaggtattcaatagtcatctaggcagtaaatccattacactcaaagacaatcagctttacggtagtcatattttaattcacacacatttgattcaattaatctatgggaaactctctgcaagatagcctaaagatcgtaaccatcaagggcataggtgtaaatgcagaggaagaaatcccaaacacaaaacatggaactgagaggagagaaagtagcataacatcatggtactcgttcatatcataggtagatgtcaaatgagttggcgttagtatcatcaatcccgtaaagcccatcacacttaatggtgccgctcacacatctcaacgacagtagtccaaccctcacaacaagaccggctcatattatgtccacaccagcagcaggtcaccttgcggggtagaagaggcgcaggccgtagatcgggcatgccttgggcagcatgtgcagctggtaattgaccgaatggcagagatcgtgagcctgtcaacttgcgggtaccggtgtcgggctgtgttttggagcgcgttcggtccactttggaatctgagaccagacgctcggggcaggcgagacgcgcgtagacttcggagggtaggtcgtgccagtacttgcagcggcagcagattacgaagatcttggtgagggtttgtgggctgtgggctgttttcgctttttgggatcttctcttgaggatgctcatgggagctggtcgggcttgggggctgccgctttgggtacccggggggctgctgggctgcatgccgggatgagtgccatattgagggccgtactgtatgccgcgataagtatcagggtgagacgcgggctgctggatgggctgcaagacaggttggttgccaggttggatacctggcgatgtgttgggttgaatgagtggactaacgggagcctcatgcacgactggcgcttcgacagcggaaattgcaggactagtatccacgcgattcgctgaatcgcgtttgaattcagagggttcaggtgcatcttcgtcggcagtgtcataatttgaatgaccgtcatgggaggagttatgtgaaggacagcggctatgtcctggcatgagccctctaggttctccagcaagaatattatcctctgggggtccggtggaagcgtgagaataccgacggggagatttcgcaggaacggtgttactatccgacagatccttggatgttcggctgtttctctcaccgggcgaaacacttcctgcatgtactggagttctgacgggtacctggcagggagacgccgggatgtctttgaccgtatcggttgacgcagttggcattccccgaatctcgagactccgtctttcactcttgactggaatcggtggcatttcgaccgactgcgaagtttcgtggaagttttctttgaaacggcttgaggttcgtttgggggtattcgacaaagcggtaggcaatcgacttcttcctcgatcctcgggatgagattgcccaggagagtgtaatggttgggatgggttctcatggttaggtttgtgtaatgtcagggatcttggaatcttgaaataactctgggccgattcatctgtatttgcaggattcaacgcgaggggagacgacttgtatgctcgcgggaagggatccactcggttcatcctggcaaggtttcccgtggagtttgtttgtgctaggctgagtggttggtaagacttggcaccagatagagttgacggattgtctggagtttctgggggtgtcatttcctgtaactgacgagccgtggtaacttgagtaggcgaatccgaatgaccgggtgaatataagttaggctggctcaagcattgcgacattggcatgctagtagccctgacagaacggtcttgacgagtcacacgatcaccgggatattctgccccgggcatactcttcctgtcatgcttcagcgctgcagaaaacagctccttatccagatcgccggaggacactagtgtctcgccgtttctagcacagtttccaaccacggaccgagtaacagtgggaatctgctccgacactgatcgattggattcatgtccatccttcgtcctccaggcttcggctgtcttccaggcttcagccatcttccagttctcacgaaggtcatcagacttcgccgtggcgtgcaaccggttgtgctgggttgggttggacattttgttcgaagcggataggttcagtgcggtgccatgcttggactgtagctctcgggtgatagccgttccaaacctttccggtagagtcaacggaagagatggtgggttcgtatctgtcctaagctggttaaactcggcagacggatcttgatcactcgaacgtgaattccggcgtgatcgccggaatatcgaggacaggctacttgacgatttcggacgctctgcattcgcactggagcttctgcttgagctgctcactggttgtttcttggtcaaacggcgagagtttctgtcatggattccgatatcgccctgggattgggattcctcgagtgctagcaaccgcttctcgagttcttttctctcggcttctaggcgctttgtgacacgcttttctttttctttcttcttgggtctttccaaggttggtttggagatattgtctccatctccgtcgggatagattggcaagggcgtcatttgttgggttggggtatcattttccacaggtgccccgtttgcgactgatagacttgagccaggtgtaccagtggagggtaaacgagagttggaggagtaagagaccgagctcggccctgtctcatcgtacaaggagtgcctcgcatgggaattactatcggtggcctcatgtgcgagagcttcgcgggcgagaaagggaactgggggaacaaatccactattctgattgtgtcgtttcttcgaggggtcaaatgagattcctaggctcctccatattgctgttgttaacttacatccatagatttgccaaagacgcggtggatgtggttagagatggatgatcgacgggccctgcggggtggatcggtggggaaggtctccattgcagttggtaaattggttcagttgactttgatctgaaaagaagcgagagacattgaactggaaaacagtccagaaatcgagggatcgtggatcgtggatcgtgaaacgtgaaacgtgaaatgtgagagatgtaaggcgtgagtcgtgaatcgcaagtcaagcagataaacaaaaacgagagacaaaggccaaggccaaagaacaaaataaaacaaaaaaacgaaagcgaaggagaaaaagaaagaaaagaaaaaaagcagcgatgatcagtcaagaagcaaaggattccaaatccgctagcattggctgcatgtgaaaccttccaccgagctattcttagtatttttttttggtcatctgatctgtagatttatagattgtgatgtatacgatttctatacaatcctatatgtaaatctataaacctgaagagaaccacccaaatctgcactcggcccagtggaattccaaactcatcgaattgtgaaactcaaagcgtccgaggcccaaagaagttggagagtcacactcgccccccacttcgcatcaacatcgaaatctcacctctacatctccccgagaacaactaaagatactctgcctaatcagccttaaactgctatcggttactcggtgctacaactacagagaatacaaaactaagaagctacacaatgtccaaccaaccccacaacgacctcccgccaagctatgatgcatcacaacaatcctgggggatctccggcactaagccacagacaggcccttcagcctcagcaaacccacctccatatcacaactggcaggaagcagtcccagacacagccacatttccaccacccccaatcaccggctacctaatctcaggcacagggaacgcctccgaagacgacgcccagcgcgcccacgatttctgcaactctgtgcccctctggctcccagctcagccctcgtcggccgtctaccacgacgtgcaggtccacgatcttcggcccgtgcagccagccgagctgcgtggccatgtctcggctgttgcgcgcggccgctggcgaggacacagtgtcgacgggaacggggattgtgtcgttcttacccagctgcccatgtatttccctgctacggactcgccgtttgtgcgcgagcagaagaagaccatctactttgaggttaagttgctggcgctgagggcggggccgacgccgcaggattgtagtggattttcgattgggtttgctgcgcagccttatccgtcgtggagatcgcctggctgggagagaggtggactgggggtgttttcggatgatgggtgtcggtttgtgaatgattcctttgggggtcgggactttacgatgccgttcaaggtgggtgagacggttgggttggggatggagtttgagctaccggagaatatctgcagtggggataagcatagtaagagctgcaaagtgcatatcttcttcacgcggaatggacgccgatctgagagttgggatctgcatgaggaggtcgatgccgattccggggatgttgagggcttggaaggggattatgacctatatggggcgattgggctgttcggtggcgtcgatttcgagtcttgtttcgaccctgcaggttggctatggaagccggaatgaacgtgtggtatctgtgaagggtccacgcgggccaggccgtagggctgaagtggttttgctttttacttttgctgtatggaatatggaatatggctttgggggttccaaatgcttagctagtatagcttgacgcaccaaatcaatatgagcatgaagaagacaaagaagtatgttgtacatataaaagccaagtaaaaaaagaaacacgctaaccaatatctataggctatgtagtttgcacagcctatttcaacggccaacgccgaggctgcatagcgtaaacgagatcccgcacgttcgttctagaaaggtatttttaattttcatttattcttaccttcggctacaacaatcctagtaaatgcagcgcattagtggccggggggatgcacgaggtgcagttccgctataacgacggtccttgcgacgtccgatgagtagtaggtgcatctctgccgcttttccgtatggtccccggtctaccccagctgcatgaacggcatgaacggcaggaaatcgttttatttgacgtcagggtgcgttgagcgcattgcgatctttgtccttttgcatgttgatgtatagtgatgtatattttggcgttgagacacgaggattagtttgagttctttgagcatatcatggttgatagctatgtatatagatatatacgtgtatatgtacgttacaaatgaaaagatatatatgggcagggcatggtgaggctgatactcgaaataaatatatatagtagacgcgacggtactccgtacttactccggacctcatacaaagaaaagagcctggagaaatgcgcactgacagcacggagataagcctgcgctcggtgctcttctaaattgtcctgttcgcgaacgatgcgtctgttcatctaattgctcgtatctgcacgtcaatgacggggttcatagcgattaatacgaaagagccgcagccaatccccgtccgagcgttacgatttgaaaagccattcaagcccagtgccataggacaatatttatcagatttattttgcgcacctatatccggatgtagcattaggctctagaaacccgttaatattattaaaatactcttgtacctgtatctgaaatacataaaaaagccagtggagcaccaacctcggtgataatcccgagactaccagccaccaagcccctattactgcaactaacccaccagggagcggctagaatggcacggatgtttccacttttggatcagaccagttataccccggctaagatcatcctatttgcacgggggggggaactacacgagctggagcggatcagcttctacagctatgccactgccggatatgtgtatattcgttgtatctttccggttgttattcggagtatgaatccggtcctctccttttttcttactgaggggtaaatatggagtagcagaatcacaatgggtttgtgtccaggtatctttgtccgatccactgaaaaagttacgaatcctccccccccccacagccgatctaaatttctgagtaatatgctaaggtacgatagaaaaagagaggaactagaactgaaagggaaaacagaacatcatccggcttgaaatggaagtggccgaaagggaaatttggtctgatcgactgcatgtcatcgccccttttccccgtgacagtcgaggatcccgtttggccccccccccacctggacatttatttgatatcccggactgacttcgggtctatgcgtcaaacccacaacacccccctctccctgtctttcacaaatcataacgttgaaaatgaaatagaaattcggccattcccggctgtcggtggagttggagcgggttcaatacattactgggagtccgtgcagccgagatacgcgtttgtttcactcaagacgtgatctgggcacggccgggagacggtggttattctgtacgtccatttcggctcggccgggagagtaaatggagaaataacggggacaaggtacgggatatgcatatgcagagaaccctagatggaactgctgcagataagaacaacgaaaagaaagacaaagaaagaaaaggaaaagaaaaacgtctgaattgccacttgtataaccgagagagaggtggtcttagccatttgccaaaagtaccagattgcgattttggacgatcagaccaaaaggatatccatattcggccgtatgcagatacattaattccatcatctccggccgtgcccccatttcgctaaggctggaacactttttagacgccaaagcgacaactggcgcgaagccagcggttgtctctatctgtgaaaggaaggagtcccgggatgtacggagtacccattatgatcccggttagggttggatatatgttgatacgttagtatacggagtactcggagtatacttagggatatcagggatattactgaattgcatagatattagattcctatgctaataagcctataccaatatgagcacggtccagctgatttcgctttcactttcactttcattcacattcctgtctacccatgaccacgagatttaccttcacgccaccgaggcagctggttgcccggcattaaacgcgcaatcaggcaatcgaccttcgctttcgtgttcccatgttttcccatgttcccccccccgtttctccgcctatctttacaagctcttagtaatgcctgtatataaaatccctccacacaccgggtattgccccaccgcgagggaggaacagcctgttacacgggcactttaggcgatcgccaccaggattacccgtaattttgttttttgttttttttttagaagtaggactaagttacttgctataataagcatttggcttcaagttacatccaggcatcctgttccgaccaatatgcatcttacgtttaatctattaatcttgaaaagaaaagaaatgaggaaaaaataggaaagtattccacggtactagtacttttgaatttcgactccgttctgctgcgggccacgctaattagcaggcatgtattgtcagaaagcggtaattgttccacaaatcacctttccagcaaagctataggaaattatttgtccaacgtaattatgggaatatataaatataaaaatagagatatctaggtctgtgtccagctatgagttccggtcgactgggcaccaatgaagggtctttcgagttccgaggcgaagagcatcgtgcatggccggatatgttctccattggaattgctctttgtgttgcctttttgccggtaaaaagaaaaaaaaaatagattgtttgtatggtacttagcaagaaagtcgttttcttagggttgcattgcttgaaagaacaacactacgccgtaccaggtatctcatatgcatccaacccaaaccgttgcctattatccacgatcttatttggatctgatttttaactaatcaagttagcatcaaaagtaaaacagaaaaggtaaaaaagtaaaaaaacaagaaaggtacatgcatatgttccccacaggggtgagcatgctcatgctcagcatactccaaggcgaactttcatttggattttgaatcttgatatattcggccacatgagatcaaagcgaagtatgtatatacactatacatatacataggcatgtgcaatacgtaaaataatcctctgcataggcctccaatgcctccacccatggacggcctctagatccagggtctctgacgcacgaggcaaaaactacctgcagcacactcaaaacgacaaccaagactggggcatagctttttagctcagctattttttttagtgtatgttgtatttacttttcttggattttataattcttttttataattcgggagattaatattatttctatattatcttctgcattttgtttagttcatcgcatgtgctgcctttcttcctactttaatctctctctcccttcaatcgtactcatctcttttttcccttttccctcttctcttttcctttgacattgaaggaagcattgtctccttgacattcgttaagacttgctttcactaagcctgccgaggcaattgaccaccggactgggtcaataggtatagcgcattgaatgcttatacctccgcatcttcaaaacgaagagaatcccccctgaaaatagtcagagatacgtggggatcaagtttcacatcatggcattcccgtttctgcgagcattcgtcacactcttgtaagtatagattgggagctcaatcagaccactagctaacgagcaaccagtctttatcgctacacccgactcgtgttcaacctgttttccttttggacattcaagccaatcccaccaccggagaatcccaaattgacatcccaagatgtaacggtgatcattccgtcgttggagggttgtggcgatgagctggtggagaccatccggacaattctcgacaatcagccgttcgaattgctcctggtgacaatcgaggccaatcgcatcaaggcccagcagatgctgaatgctatgccagcgtcaaaatcccgaattcgtttgtttacagtggagcaccccaataagcgccgtcaaatgacggaagctattcccgaggtccgaactgccattacccttctcgcagatgacgatgtgagctggccacggactctcctcccctggattctggcgccctttgaaaaggacgagaaatacggtggggtggtgacctgccagcgattgcgccgggccacggcgccgagcctctcacagcgactctggggcttcttgggcgctttgtacctggaacgacgcaacttcgactgcggcgcgacgactaatgtggacggtggccttccctgcatgtcgggacgaacggttgcgtatcggacgcgaattctgcagaatgaggccttcacctatgcgttcaccaatgaggagtggtggtgggggaagtaccaactcaatgccgacgatgataactttatcactcgctggatggtctcgcacggatgggaaacttatatgcagtaccacccagaggcggaggtgctgacaactctcgaggacaaccctcgtttcttgaagcaatgcgcccgctggtccagaagtaattggcggagcaatttgacttcgatgtttcacgagaagcacatttggcagtgagtgcaacttttcctttctttcctcttgaattgtcttaccttgactctcttttttttcccccctccctttgtttgtttttctctttgatcgggtcaaaaagagtctttttggtccgagtcttggtgtgacattggaaacaaagaaaccacctgggcagaatatgcagaacagagctaacatttctatagtcgtcagccctggagcgcctatgccgttcatttgaccacgttatcgccacctgcctttttgggcgacattctacttgtctggttgtgccacaaggccactggatcgtggggagagtccttgcacgatcaatccatgactatgctctacctctggatcttcactagcaagtggattaagctgctgggccattaccttcgctatccagttgatgtgctgttgctaccagtatccatcattttcggttatttccacggcgcaatcaagatgtacgccgtaatgacattgaatgtggtatgtttaattctttcatcttttgattcttttcatatttggcatttccatttccttttccctttttccttatctggtgcatatacggcaagtgtatccaagcgtagcccctctcctatgacaactcagcatcacagcgctttgatcgtctccttgcagctctgtttacccactattctcctatttccccgaattatttgaaattgcacagctctttgccgttctgatttgatctgcctttttaaaattgactatccgagagctggtctaactttgccttttttttcacagacaacatggggtagccgtgatggcgccgatgattatgatgccgagcgtatgaagaagcggacggatgccgatcgaatgaagcaaccgtactatccgcaatatctcattaaatgagttcttcgattttctatttttttttaccgaagatccatttcctgttcgctttcggggattggtctaccatgtccgattgtacaacaggggagaacttctagcccattgacttggccctttatatcatgacgaaacgccgtgacgacacctatgctttgttttgttctagatctgccctggttttttcttttttttgtcaaccctggccattccgcctgcccaagtcctcgagagtacgagcttcgaagtggtcatgctcttctccctccaacgaaccaatgggtatagcgtctttacttcttctgcccaatgtttttcctttcttcgcacatggttgcctggttatcaaaaacaaaatggtggtctcgatcgaggccttttccccttctcttcttgtaaattacaaaagcatgggcggatctcgttttgggaatgttctgtgacttctttgcgtttcagtttgcttttcagctttgattcccctgagtttttctgtgagagcttttgtctactctttttagatgcaaggtggtattctggaactttggttgtttctctcctgttttgctttctcaaactgcagataatttctaattgattggaatatactccgtacgcatatttgtccagggataggaagatatagccctaaagctacgaaggttgtacttcggcgaaataatggatgcatcctgtcatagttcctacttctggtgccatgcagatgattcggtctagaaccaaccgaaagagggttgaatgtaagaaaatagtgtcaaaataagctgatcattgacataggtacggagtatataatattcatgtaagacaaggtatcccgttcggattaagatgtggcgtggcgagccaagacttttcggaaatgttcgagttccaaacaactccaacttcgaatccaggaaccaattgtccctccaacccgcgctttcccaaatataatccattttcaagggcctggtactttgttcaagatggtggctttcgctcgcgctgcgctgtcttcgcagctatccgccgtcgcccgtccagtctcgttatgccgacgcatccactcgtctcacttcagatcagctgttgcacacccaatcactgctcacggccctcctcctaaagccccagagctcaaggaaaagtcaaaaccgaaggaggcggagctcccagcccccgagggtgaaggatcgcgatacaacctcaccgctgcgttgaggaagcggttttggaaagatgtccatgtgcatggaaagtcaggtatgaacgataaaggcattggctgtctttctcattgattgaccccgtccttcggtgaatactcatcagctaacccatatctagacgaatatcaagtcctgctggacaagcgacccgtccgaaccccgacgaaagaagtcctgactattccctccacaaagccccacctcgcccacgctattgcactggagtgggatgtgatggcctccgcccaggaggctcttaaaagccacctcatccctatgacctccctcgcagcccgcgccaccgatatcgcccgtgaagatgccgagggcaaaaacaccaccagaaaacagattctcacaaccgccatgcgttacctagatacggataccctactctgctgggagcccgagcgagaaatgcacgtgctggagcggacggcggccgatggaacgcccatcgagagtcttcgccagattcaaacgagaattgccggcaacgtcatgagctttttgtccactaaggtctggcctggccttgaaatcatccctatcctcgacgccaatagcattcttcctctcgcccagccgaagggtacgaaagacagtatcggcacttgggtttcgggactgtctgcgtatgatctggccggtctggagcgcgcaatcattgcttccaagagtcttctcattgcggtgcgcctggtggtggaatggagtgagaacttccgccatcttcagcgacctgagacgaagaggttcggtatcgaggaggcggctgaggcgtcgagtctggaggtgacctggcagactaaccaatggggcgaggtagaggatacccacgatgttggcaaggaagacttgaagcgacagttgggtagtgttgtgatcttggttagtggagagactcggtaagctacgagtgtatattaggtatactgtatgatagatatagatggcatgaccatgctttgtataaatgcgtgtattacaatgaagactaccatgagtttcaccatattctgtacaaaaattggtaacatactgggacaatgtagagatcgggtagggcttagtatggtaggtacgacaggtttgggtttttcgccagaaggttaaccagctgccatgaatcatctatacatatatgtatgtagcctcttaaataagcctcgtgatttccaagctctccgcgtgattgttctgtgacaaaccagcatggcctaggagtatcctccgacatggtgaggagactaaagaaagaacgaccaagaagggccaagttgttgatcaaaaggtaagtctatccatacctagtaggtgtaagtaatatgtcataaatgtaaagtctagctctgttataaaagccactttgttatcgtttttctggatgtctttttcggtgtcttttagaatataaccgctaaccatccccaattattgttagcaggggacctttgatacgagctttttctagacatttaagaggctacatacatatatgtataatgtgcaaccgatacggtattccgatatgtaggcaacgtgaagtatgttaacgacgtttgatttatatttcccctactagttactaaaagattgtataggttattttccctcatgaccatactaagaccagccaacgactatttatcaaacgaggcgatctccttgagtcgagggtggatcatcctaatgggctacttgagtttgatattgatcgtctacgagaatatgcaacttgtgccctctgtcgtatggaccttactcccgcgacttaaaggttctcatgcttagctggcttgtggcttctatcgagggcccgagggcgttcgacgatattcaatgacttgatgtttgcattccaacataatagtagaaatcgtaattagctcacttaaccctatgcattcttggctttgaaggcaagaagccctctttctatcccctgttctggcgtagcaattgattcaatgcacggttcctactatcgctatcatgtagagctttgccatctacaatgcgaattgggattgcagcctagacgattctatacggagaaaagctggttgttcattgacatatgagaatggtgtaaatgctgcagctgtactacttgtatctcccgttggacatcggatggttattgctaattgagcaagccaatcacttattctgtcatcatgaagctattcagagatcacttaactctgactttcctcttaccctatcctttgcatcactggtcaacagaaaatgtcatccaccgctaaggctcagtatatgtggatagacatgaaatactgaagccatcccaccgtgttggaccaaatctagcctactccctgcttttgcgactatgccctcttaaatgcgagagatcatactaaaagcataaaaccacgcagagggtaccctcaaacaactttcacccgaattcatcttttcgcccgagactctcaattattgcccgatatcgctaaacagattttagtaactaactgactagttattaaactaatgttggatgcctaatgaataaggcacccagtggggaacgaatatctttgtccacttcgtgctccgtacagagtagatagatctcccattctctctcttcctaccctgagaaatctgaacatggtccctaaaagccctcgtacacgctattctccttattcatatcgtactcagactctagagttaatcactcttctttatgagatctgcctaataccgtcgagcatggtagtaccattattaaaagcatagtgtagatcaggtgatctccaaattcatggtacggtcgtaaggcagatatcttagaccggaagaaatgctgctgacgcttaggcttgtctgtcagttcttctgctctaccttacttttcatagtggtgtactataatatatggcactcgtactgaaattaatatgcatggagacttcgcctaattaggttagaccgccgtactccgtagtaaaatcgagactcgaggggacccctacactcatgccaaggcggagttcagcaccatttgccccccaaaaaagggcccgaggccccctcgaatttcattccaagtcctcaactttgagcagacaacattcaatttaatgtgttggacatagtccagtgtgctccaagtatgtctgatatacctgaagagtaagtctttgttcccctcaggttggcactagaaaccctcgacccatggttcgcatcatgacagcggggataccttggcttcactgccttgatatatctgtcctgagcctgcaccctttgaagcagtaacatacggtgcccacagtgcaaagtgtacggattttacacacaatttgtactgacatgccactgtctcgcaggcacaaacacaaacgctctcgaagcgcaatagcactttccctcctccaccgcgacaagtccaaaggcgaagataaagatcccgataacaacgtagacaccaactcgcccacctccgcctcaccaagcccgggcccattgaaacacacccacagcagcagcagtcgccatagccgtcgcaaaccaggccaggacacaagttcgccacccgccattcaagaatccgccgaggatatggacacagtcgaagacctgccttccttgaatcaaatagagactggcagcatgtcgctcgaacagtccgttcgcacctttcgtctcttcgagatcttgcgcagcggcgataccaccgctatctccaaggccatcaaggataccatcgacccgcagggtgtgagttatctcaacggcacgaccgtcctccatttggctttgcaatgcgccgagccccaggtcgtggaatatgtgctgtccaatgcggaggatatcgatatcaactcgcgagatcgggatggaaacaccccacttcacattgctgcccagctgggccggggcccgcttgttcgcgatttgctgaatcgtccatcgatcaatgattccattgtcaactatcgcggtcagacgcctctcgatctggcccgtaccccggaaattttccagcagcttcagcttgcgcggtctctcttcatcgatagcaagaaccaggaaattcaggctttgattaaaaacgctgattataagggcttggaggctttgctggaggaacctcgagtggagggtattatggatgtgaacagctacgacctagttaccgacccgacgacagcccaatccggcggcacgcttctgcatgagggtgctagaagtaaagatgcgcagctcattgaaatccttctgacgcatggcgccgatcctttccgccgtgacaggaaggggaagctaccgcaggatgttaccaaagatgataaaatccgtgctctcttgaagagatcacccgctgctgctattgcccagcgcggtattcaggaaagggctattcttggaaatagtaatgcccaaggccttgccgggcgcgtttcgattggtgatgccccgcttgccggcaaggatgctcgcgaaatgagaggctatctcaagaaatggaccaattacacaacgggttataagttgcgctggttcgttctagaggatggagttttgagttattataaacatcagggtaagctcacggctcatcttcagtttcgcatcacccctcgtgccgtcgacccctgctaaatttctctatagacgatgccggctctgcctgtcgcggtgccattaacatgaagattgctagacttagcatggatgcgcaggataagacgcgttttgaaatccacggcaagtcgtcggtcaaataccacctcaaggccaaccatgttgtggaggcaaaacgctggttctggtctctcaacaatgccattcagtgggccaaggacgaagcgaaggaggaggagcgtcagcggtccaagaacgcagaagtgcttcgccaggctaagatcgatcacacagaaggacgtcctacagataccccatcagagtctggtctttctcacaagcctagcacaaagaatctcgctcctccgtctttgggcggtggtagcagcagtggcacaaggctcagtacatatgcatctcgcaccaccctagatactccagttggagacgaggacagctccatttatggcggttcttatgaccacgtccctgctccaaatgacatgaacagagtagtcagtcatgccgcatctacgccggagggggagggcgatgatgaagaatatatcgactatggttcaagtcacgataacgacatctcagccgctgataaagatgccctcaatatcaccgcacaatctgcgaagcttcagttggatcttcttgcaaatgtggcagcctcgctacaagccgagaaatccaagaatccgcaaatgaccatcgcggatccagccctcgaagaggcactcggtgcctacgaagccgcagtcagcagcctcaagggtctagtgcagaacctgctgaagatatcacgggaccgagactcttattggcagtctcgtcttagtagagaggagtccattcgtcaaatgtgggaagaaagcatggcccgcgtggcccgcgagcacgaggagctgcaatctaagatgggcgagtccgaggagaagcggaagcggactaagcgggctctgaaggaagccctggagagcgcaacaggcagtagccgttctatcgtcggtgggacatcccgtttgccaacagagagacagagtcttgaggccaaccaaattgaagctggggctaccgagacagataaagcagagcagcccacacaggaaccatccgaagtacccgaactgtctcgcaaaccatcaaactactccgagctcagcagtctctgcgattcagaatcggacggagaagaattctttgatgctattgatgccggtgaaatcgaggtagaggatgtcagcaataccaagaatatcaatatggaaccaccgaaagacgaaagtgctgagcttcgggctgtgaagagtaccctcatcgcaccatcctttaagggttacgaggatcccatcagagagcgacttaagatggatgctgatgatcggccaaagatttctttatgggtaagctgtgaagttagcttctgtttttttctttgccagtgctaaccacaattttagagtatcctgaaatctatgattggaaaggacatgacgaagatgacgctcccggtgtccttcaacgaaccaacttcactacttcagcgagtggctgaggatcttgaatataccgacctccttgacatcgctgctggtcgggccgattcaatggaacgcctggtctacgtcgcctcctacgccgcaagtgagtatgcttcgaccatcggccgtgtcgcaaagcccttcaacccccttctgggtgaaaccttcgagtacgtgcgtccggacaagggctatcggttctttgtggagcaagttagccaccacccaccgattggagctgcgtgggccgaatcgcccaaatgggactactgggtaagtgcatccgattttgtaggcgtatatctgttaccagggctaacccaaactacgtatatagggtgaatcctccctcaagtccaagttctatggcaaatccttcgacatcaacctgctgggcacatggttcctgaagctgcgaccttcctctggtggagaagaactttacacctggaagaaggtgacctcgtcggtcattggcatcattactggtaaccccacggtggacaactacggtttgatggaaatcaagaattggaccaccggcgaagtctgctacctcgacttcaagccccgtggctggaaggcctcatcggcctaccaggtgacaggaaaggtcgtcgacagcgaaggctctcccaggtggagcatcggtggccgctggaacgataagatctacgcccgccatacccccggcttcgaggcacctgtctccggccaggatcccgagtccgccaagacattcttggtctggcaagctcatgaacgtcctactggtctacctttcaacctgactccattcgtcatcacactcaatgctctcccggacgccttgaaggagtggctacctcctaccgataccagaaggcgaccggatcagcgtgctatggaagatggtgaatatgatttggctgctgatgagaagcaccgcgttgaagagaagcagcgtgccaggcgcagagaacgcgataccaacggcgaggtctacgagccgcaatggttcatccgtgacaagtgtcctgttacgggagaggagttctgggctcacaatggaaaatactgggagtccagagatgcgcatgattggagtcgatccgaggatattttctgagaggtacttgttaatttggcttggctgctttgtacagactctcaattgtcataaataaacgaatgaattctgaataactttctcgtgaatatggactcaaatgagtaaaatcgggtagtaaataatatatgtttcggtagagtccatctaatgaatacaataagcctgacgatacaagtttcatagatggtcgttatcagtcacgtgtcgccgcaaaaacatccccagagctatccgtggtctgatcggttcccctccacaaccaattgacatcgcaatggcaggatacacttgtgtccagtgcctacagaccctccgtaacggagtccgggcctcagctcctcaggctcgcttgcagagcctcgccaccgcgcggagaagaagccccatctccccgtcgttcatccgcagctttggctcgcaacgcaacagtcgatcgctgggcaactcccaggagcagccccagcatacccacagccagtcctgctgtgcttccaagtcctcgccttcgcccgtcgcgcagcgggcagctcacacggcaacctccgccgtcaaaactcggctcaaccctcgggccgtcttgaaacctgacaacctgttccactccttctcgaactcgccctcgccggcaattcgcaaacgcgctcagttcatcaaacagaatgccttctgcccccacccaagccaccagcagacccgcgcgcccgtctcgccgcacgaccccgaagccagaaaaaccaccgatgttgcaaacctgcccccggctcattcgcacttcgagtgccccgactgcggtataccagtctactgctccgaggaacactggatggatgacttcgaggctcacctcgagatttgcgacactctgcgccagatcaacgaggatgaccatgacctgaactccggccgctccttcccggaattcaattaccccggtcctcaggatgataacttcgttatcaacatgactaactgggatactttcctctatacccgtgaattcccggctatcaacgacgaccgctccatgcgtcaggttacccgcatgctcacctacccccagacaatcggcagtgtcctgcacgagcttagcccgtacagtgttcgttccggtggacgactcacaccggagggattgaagagtttgagtggtaagtcctgacttctatacggcagtagaggactactagcagcatctcccacacagcaaactaacccatcctcagccctgcgctactccctccaccccccgaaagctggcgaaggcattgacgtcaagggtctccgcctgaaggcgcctccagtgcgaatcttcatccttggcgcccgcgcagagtcctccctcccccgcgacgtctggctgcagttgcagtacatgtacccgcgcgccctgctgcacctgatcttcatcggaccggagagcatgacgaatcgagacggggagtatccgcttcccgagcgcacgcccgaaaaccccttcggcggtatcgtcgaggacagactcggtggccagatgaagattactacttacgtggactacttccacactatgaacaaggcgcagtatttcggccccttcgatccttacctggattgtttcatgctcttccaccctggtctgggtcacccggctagctcgcatgagtgggaggagacactgccccagttgcttgagactaaggttcccatcatctgtacagggtatacgcagtgggatctggagcgtgatatcaactgggtgagtgagaagtgtcgtggggagtttgatgtgcttctcgaacccggggagaatatcttccgcagtctgcgctgggatctgaatgatcaggatcctcatgatgtttcttgtggaaactggggattgtgggccttccgaggcaagaggtatgtggtgtcttttactgaatagagggatgttgactaacttgctctgcgacagatacgaagctgctttcaccaaggaggagtaagctagttgtgcctctttccttgctgtacgatattttttggtgcccgttcttggggtcattttagtagataaggttcagtttcagtcctctccgaagttattcacgattatcgatgcgcttgatttcagtcagttcgttcttgtcaagcatacgtagatgaagccgtagctaaggtcttagtgagaagctaggaatatgtaaagactaaacgctccgggcatagttaattgaagaaatattacgattaggcacaggtcaggggtagccgcaatgaattgtatcaattgcacaaaaagtagagctcgtcttacactcgttaagtaacagtagtatgacatccgaaggaaaagatgcaagcatcaatgcagggacagaattcaaggtcaaccaagacagaaaggaagtagcatcaagatagaaaaaaaatgcttggatgagatcaaaaggggagtatagaaggtaaaagaaaagggtataaacatcggaaaatcggaaaacacgtgtcaaaaccaccgtaaccagaaagcccgtaaccagaaagcaaggttttaaagacggtatgtcaagaagaaggaatatgtagaagaggaaaatatcccaaaatgaagacttgggaaggatcaagtggggaccattatagatgggcccgatgtgacgaaggtcgacaccaagattgaggggttaactcgaacatttttcctcaaacgagtcaaggaattgagtttagatcaagagaagaccagcaatggcgcctgcaccagcagcaatgaaaccagggaggtggatggaggcagcaccagcagtaagaggtgaaggagtagccgaggcactctcactggcgggggagctgctagtagccttgatcaggggggtggagctggcaatgtggctcatggaagggatgacgctgagggtgggaatgctagtgatgacaggcgtccaggtcgacgagggagcttcagtcgaggtctcaatgggggtttcagtcggggtttcaatcgaaaccgagctcgaagttgaggtcggggtgggggtcggggtagacgacgggggaggagtgtagccagagggcaccagagtgatggtcttggtgatgcagtcggctgtggcagattcagcggcgaacgcgacgggcgcgagggccgagaggaagaggagagccttggtgaactgcattgttgatgtttgttgtggtttaaggttatgatattgagagttgagagttgcgaattgcgaatgaagagtaatccgagtcaaaagagtgaatgcagcttataaaagagtgtaatagctgggagaacaaaagagtgacactgtttcaaacaggagaggttgcaaattaagagagaaagacaggggagtaaaggagaaggggtgtaggccaaggccaaggcgcttgttcaaggcgcttgttcctttaggaatgggccaggtacccaggcagcaaggcatcaaaggagtaagcaccaaggcatcaaggcatgaagggtccaagactagtccgaattaggtatacatatatactaaagtcttcccccttttcatagttatatcttctataaagactgaagaagcgggtgaatttacactattatcagacagtaaggccgtacctcctgttcttagcttcattgtcacaatctagattgtatacggagcacagtttcaggtaattcaatatcaccttgacattatgagaagcaaagcgcttatagatataaaaaatactgttgtacaggccaagggcaagttcccaaaccggggtatcaaagtaacagcaaacaaccatcccaatcatccttaatcatagcatcaaagctcatcgtcaacacaggccagatagggccataataacccagcagtcagaaagcaaaaacacagctgtcatttagaatccccatacggcggccactaccacagcaactgtcacccagtacccgctagcatgcaggaccattgcgacaggcccggatgccgaggaagtactagtcgagcttccgtcagcggcagtggtaccgttgggcaaggtaccgttgatgtagatggtctgggtgccgttcacatcgaccacgcgcacaagactcgagttcttgggcacggtgccgttgaagagggactcgtagtatgtgctgttgttgttattgtcgcagccacactccgagtactgctcgcacacacagacaacggggagcgactcgttcttgtgggcattgttattgtagtagttgtagtgctggctgtaggggtaggcgtaggcgctgtacagccaaagacccgggaagaaacccagtgcggctccaccgagcacgtagggggcgatgcctccagcagaccgcgagccagacgtgtagggagtgcgcgcaccgccagcatagtagttgcctccaccgtaggttgctcgagtgccagagccggcgctggttgtaccaccagcattgcttgttgaaccaccgcgactgctgccactgcttccactgctgccactgctgccactgctgccacttgagcccgaggagccggaagaaccagtgcggcctccactgcttcctccactgctgcttccactgctgctgccactgctgctgccactgctgctgccgcctcggcctcctccgccaccgccacgccgtttctcaagcgttataatatctgagctgtcctgggtagagtccagggagtccacatctcgttcaataagatcggtagactcggtttgagggatagtcagggataaggccctggtggaaagtagaaggagcgttgtcgcccaagtgaacttcatgatgaatccgggacccaagtatcgagtgatagaatagaagaatagagaaacagaagatctcgaagggcgtgagaatcaaaggaaagtccggtaaaagcgaattgaagtagagtcacggtatgacgaaattccgaggaactccgactcctcaagggatttcggagccttttaaatctttgaagtgctaagagtccttagagttaagcaattacagcatgaatcttaaaaagaaaattcatcaaagccaaaccaactcagcctcggaccctgaccctgacccgcacccctttagcggcccaagagcggaatacgaaaacggtggtgaatatttgcttggcatataccggtattttgtatgttggagacatttgtttcaatataattgtgctggatgacctcatggggtggctatcttccagtatacactttgcttcgcctcattctgtgagccctcgaagttggatattacttcatgcaatcttaaaccaacggcgctcatctgcgccccgtaaatggaccaagaaatgagtttctaagcctcaaagtttcgagaaaactctccacaacatataaatcctttgttatagagtaagatgaggccgtctggtcctatagatcaagacaagtgcgccttgtttcaatatttggcatttcagtggttatcaacttattccctttctaatttctataaaagatgattccagctttacatttgaggtttcatagccaatcaatagggcattgttagtagttagttatcaatagatagtcaatagttagttactacgtcgtcaaatagtgggacatcaccggtcggcacccaacagctttcgcccgagtcaaagctgcctttctctttatttcccccaagaacttatttccctctcatggcacgtcaaagaggtctttcaaatgcctcctccacttcatccctccccgaccaagtacaaaaatcccctattcgtgacccggcccgcagaccgctaatgcaatcctaggaattggggagcatgtatgattacctcgccaaagtcattctcctaggaccgagcggtgctggaaagtaggtatcaattatatcgatatgcaatatggtatatacaagcttagatcatcttattgacacccgatccttgtatcacaggtcttgtgtactacaccgcttcgtgaaagacgaatgtacaaccacccctccaacctcactctagctccccctcactgacacatcttctctccagggcgagtactctcctctcagaccatcggcgtggaattcgcctcgcgcatcgtgaaactcggcacgggctcgcgccggagacgcatcaaactccaactctgggatacagcaggcacagaacgctttcgatccgtttcaagatcgtactatcgcggcgcagcaggcgcaatcctcatctacgatgtcgcttcctacacttccttcgcttccctgccgaccttcctcatggacgcccgcgccctagcttccccgaacttatccgtcatcctggccgggaataaagctgacctgacctccgacgctcagtccgatttcgaagattactcccgcccccctccgactccaaccccgtccagtatttccagcagacagtcatctatcccttgggatgcgaatgggtcaattcgctcgactagcatgatgggtacggggactaggttgacggctacccgtgcctcagagggcagagaggtgagctccgaggagacatcccgctgggctgccaagtcgaatatacctgtcgctgtggagatctcggctctgacgggggagggcgtggaggaagtcttcaatcggctggcgcgtatcatcttgaccaagatcgagctcggtgagatcgaccccgatgacccgcagagtggcatccagtacggagatggaggtctgtatggcggcagtgatgcttcaagtatcagaagtcgggcgacgttggacgataattccgtgccccttcagcgcaggaatccccgtcgaaagggcaaggctcctggcacacctagctggaagagcgggatgagggaatgggaggatgtcttccgcttgggctctggaagtcgccccaatcaagggtgttgctagtattgtggatcattctacatcaccctgggtacatttgtttattttctgttttgatttggtctttggtttactacactgcacgataccccctcgttgaccttgatcattcaaatgtttctacatacttgttactttatttacccgacagctcagacctccaagaagaggaattaattgcatataaacttttgattcatctctcgttcaaaatctgcccccaaaacaacgccccgtcatccccaacgtttcgtctctcgatttatacatcaatgccagcaatcaaggtcttaatgcccttgccagccttgacctcaacaaaggccttctcagcatcctcgaacttcactgtatcggtaatcaacttcttgacatcgacactgccggacgcaaccagcccaacggcaagcttgtagtccccgctaccatatcggaagctacccttgatggtcagctccttagaacaagccgccatgatggggaatatgatctcgctgcggcccatgccaccctgtacgtatgtgcctccgttgcgcaggacatggatgcccgtgtgcacggaaggctcagcgcccgaagcgtcaatagcaacatcggcaccaaggccgagcccattctcctgtctcagacgctcagcgttctcagtggccgggacatttttaggcatgaatgtcgccgtcgtggcgtagtccttagcaaagtcaagacgcttctgttggatatctacgacgatgaccttggaggcaccgaacgcagtcgccacggcgcagcacagcaagccaacagggccggcaccgaataccaccaccgactggcccgggctgactctagcttggcgcacaatgtgcaccgcgacactgagaggctccatgagcgctccctcctgtagggagatgcgctcggggagcttgtagcagaagtcctcggggaggacatagtacttggccagggtgccgtcgtagggcggggtcgcggcgaatctcatgtgctcgcacaggttgtactttccggccttgcagggctcgcatcggcggcaggggatgccgggctccatggcgacccggtcgcctaccttgagggactggacggccgagccgacttgggtgatgacgcctgctgactcgtgtccgaggaccatggggtctgtcacaacaaatggaccaatcgatccttcttcccagtagtgcacctgttgcggggattggttaggctggtgggtcatactgttttcggggcatacatacatcactgccgcagataccggtgtacttgacgttgatgagcacatcgtgaggttctttcagctcgggaattgggcggtcttcaaaggtaaccttgtggacgccctggaggatgaatgagaggttctacatggctgtcagacttatcctgtacgtcattctcgacagtcctacctcaggtgtggccattgtgtatatttagaggagcaacggtgggaattccggggaaatcagcaacggttgggggatggagggaagagtataaggagttaatggagattctacacgcaagagaggaatatatatctcgaaaagataaagggatcgggagaatccagtcgaattgaattgaaccgaacaacgcagagctccccgcaggtccagacaagttccactatgtggatcagcctctctttctcttttagccgcgatattaaccggctctcggggcttttggcgggattttctttcctcgatgaagtcacaagaggcaataaacatcaggccatgtgacccgccagtggccgccacttttggtcaagtgacgtacttgatttggataactatatcttcaatacttcgtataggatacaaatatatatgtatggtacttgatataagaagaggtgatttagttcctaattaaaacaacacatataaattcagataagatactactctactactacggtgcaccttatgtagtattactataggtagatactatgtattccagggcttgtagacctttctcagccgaaagctatcggccgaaacgccaagacccggggattttgtccgtcctcaagctctctctcttccttcctctctcctctctctggtagcttagagcttcacttcttctacacattgcaatggtattcaatgccctcgccctcggggcgcgtagtcttcggactcgaccatcaccccgcctggtgcgccatttcgcagcttccgccaagcaagcaaaggaaaaccaatcattcaagagtcaactatatgaaagcacccagcagcgcttgaagcgcgagcgtgccgaacaggaaaaattcgcccaatatcaaactcaatctcccgcgggtcgctctgccgctctgatcttcggtatgcaaagctgagataacttacattgtcctctggatcggtcagctaactagacctgcaattgcgctgtagctttggttttcttctcaactggtgcttactacctcggatccctcaagcccgcagctctgccaacgacatctacgactcccctctctgatatcgggcccgcaaaacacaacgtctctatctccaacctccaggcagcgtgggccgatttcgtcgagatcttgggcaaggaaaatgtttcgacttcagttggcgacgtggaaatgcattccggatccgattggtcctcctacacaccgaaagagggcgagaagcccttcttgatcctctacccgtcaaccaccgaggaagtctcgcgcatcatgaagatctgccaccagcgcattatccccgtcaccccgtactccggcggcacgagcttggagggccattttgcgtctactagaggtggcgtgtgcgtggatttccgtcgcatggaccgtatcttggcgctccacaagcctgacatggatgttgttgtccagcctgctgttggatgggaggagttaaacgcggagatcgccaaggatggacttttcttcccgccggaccctggtcccggtgcgatgattggtggtatggtcggaacagggtgctcaggaacgaatgcctaccggtacgggacaatgcgtgagtgggtactgtcgcttactgttgtcctcgccgatggcaccattatccacacccggcagcgcccaaggaagtctagtgctggttatgacctgaccaagctcttcattggcggcgaaggcactcttggtctggtaacggaggcgaccttgaagctgacggtcaagccccagagtgagaatgttgctgtcgcaagctttggcaccatccacagggctgctgagtgtgtgaccaaggtggtggaggctggtatccctgtcgctggtgttgagattctggatgatgtccaaatgaagtgtatcaatgcaagcggtactactagccgtcagtggaaggagtcacccaccctgttcttcaagttcactggtaccccgaatgcggttaaggagcagattggtttggtgaagaagattgtgtccacaacttcgggaaatagcttcgagtttgctcgtgatcaagacgaaatggcagaactttggagtgcccgcaaagaggcgctgtggagtgtcctggcgatgaagaaaaacccggatgaccacgtctggacaactgatgtcgcggtcccgattagcaggttgcccgatatcatcgaggcgaccaaggaagatctgaccaagcatggcttgttggccggaatctgtggccatgttggagatggcaacttccactgtaagttattgcctttatactacaaagtcgttggacatgtattaacagccgacagcgatcatcctcttcagcgagactgagaggagcatagccgagggagtcgtgcaccgcatggtgaaacgcgccgtggagatggagggcactgttaccggagagcacggtgtcggtctcgtcaagcgagactacctcgagcacgaggttggtgtaactacagtggacacaatgcgccgggtaagtcttgacatacattctcattcaaccccagactccaaatacacctttgtctacacccatggagcataccactaatactcatatctgcactagctaaaattggctcttgatccactccgcctgctcaattgcgacaaggttattcgcaccgaacaaccggcccccggagagatcaaggaatggtagatgcctcgcccttgacaggatttatatatccgagacactgctgaggctacctactccgaatccgaaccggaatggtgatgatggtggtgtcggcggtgtcgatgacgttcctcatcatcgctgccagagcccgaaccgtgtctggggcgctcctcgccttcatattgtcgttcggggcggtaaccatcaccgccctctcgctcaccatatccttcctgtggccgatagccggaattctcaaattcattgtagccaggctgcggtctaccatatccggaggactccctgtacatcgtggttaatatatgggactagccaataacaactgatgaagtcaacttactgtccatattcctcacggggaggtgggcctccatatccatattgtggctctgtacgctggtatgggccaccttggtagatttcccgtggctgctcctgatagtaactctgactctccgactggtattggtggtgctgctggcggaaattctccgctggaggtgcgtagccggagtactcatcgcgaggcgggggtggttgttgatagacagtttcactttgatattcgtatccgtcgggacgaggacggtattcttcgtggtgagccacgggctgaccgtagcctccgtagcttggttgtccatatccgctctggggttgactatatccgctctggggttgactatatccactctggggttgactgtaggagtcccctccatattgctgctggctctcatgttggggtcgactctggtaagaattcccgctgtcatagttttgaggctctgggctctcacgatcaggctttgagccgccgttgttgagaagcatagagcccatgcctcctacgagtccaccgagaataccgccaaatgcgcttcctcccataacctcggaggcaagattctcaatgccaacggagtcaccggacgcttggcctccaccagagctgccttgagccttgggaagagcgagcggcttgccacatccgtgtccgcaatcttgcacaccatctttatgattcctgccttcgaggacaccatcgcggctcagctggtcgcggaggacgtcacgctcctcgtcattcttttcgttccaccacttttcgaccgtggagaacatgatttgatgcatatcggcagccccatcatttccagactcacgaagagcggggtggtggaaaacaccagaaatgattctgtcaagagttcggtcgacatcgacattctcgtcgtcccagcatgacatgagctgaggaactgcccatttgacaaccgctgacgcaatacgaccagcgggctcattcaggatgtttgagaagtggtcttttgagagcattgagtgagtcgggtttgagcagctgtcgtcgttaaacaccacgtgctgttgctcccggctgctctggatcacctcggatgaaccggtttcaagctcggccttgacctgcttgatgatgggaaggatgtaaggagccagaatagagaagacaaaaatggtgatttgatcctgaatttgctcgatcaggtcgggcaagattggaatcttttcgatggccttgttgatttgtttcagcaggttgtcgtgccactcgaggactgggtagatctgcttctgggcgttttccaggtaaagagtccactcttcaggatcccgaggagtgaccttctcgccgtcatgtttggcttcatctgccttggacttgaagtcatccatcttgctggtctggtcggtatcaccaagcaaaccgtcgggaatcttgctcagcagagtctgcaggaaactctcggaggaatcctcattctccgattgggcgacgacagtctccaaggactcaatttcagactgcattgtcttatcggacaactctcccagcaccgaatggaagaaatccactccaccaaaggtaccagtcacgattggatagacttcctcatcgaccccgtcaacctgcagtttagtgtcgcgtccgacatgagggaagacctcggtctctcctagttcaatcaggctgagctctgtgtagttggagtgcgcagcataatcttctaggcagtgcaatccagtgcccaacagtcgcagagcttcatataagtcgtccttgttcctggattggccatagcgccggcccatctgaatcgagcggccgagaacacggcgaatcagcgcggccgagttgtcgatatcggcatcctcagttgcgatgtagcgtttcaagcctgtgtttcgaattggttagtccaatatcgaccaccgtgtgatcaaattccataccggtccgggaatcgactgcaagttcctgctcttcgtcaacgggaccacgtagtcgcggatcgtagtcacgcgcatcctctccggtagcgtatcccaagggattatcgatatgctccgtaggttggtaacatcccaggcgttcagtcgtaacctcaaactctctggttccgtatcttttataggtcttagcgaaaagtcgacagtctcgatatactttcacaactcacccaaagctcatgaatcccagcacccacagcaggatacggatggcttcggcactaacgtatttgacggtgcccacatcgactgcttggctgtaatcacgcagccaattaccgaagtagacccgctttacatccagcttgccgaatttcttaccaccggcgaccctcgccataagcagagtcagaagggtatcctcaatgtctccatgacgccagttttgaccttcgaggcgggaaagcgaggcgatgtttccagcgccaaatgcatatgcctggccggagaaagcgacgagtatcaagagggtcaaccccaggttctgcaaagacagacccatggttggagaaatggtacaatgtcggggatattttttatgcaaaagcaagggaagaaaaggatgagaagaaaagaagcgagagaaagagaaagaaacaaaaaagagtcaaccccaccatgtacaacacacaatgtcaaacacttggtgggatgaagatcatggtgggcttggctgcagcttggcggctgtacgtatacggagtacatgaaggtacatgcggtacatgtggtatatggagaatacatgaaagattcaagtggagattgtattgccaggtatatcgtgtaaatgaggtattagggagaacaggggcgataaaggaatagattaaaataagatgagcctaggcaaaaccgcactagcgcgacgaactatttcaaactaatcaaacgatcaaaacgaatcaaacgaactagaagaactagaagaactagaagaattagaaggaatcatccaataggaggccgagtgggtaatataggggaagaataggagaagtcaaagccgcatgcggtctcgatcccgtctgtctccggcttcaccgccgtctcctttttctcttcgactgggaatatatctactctcggttttttattacttcattacttcctttttttcctctctctggcttcgaactcttctactcatcggaccctgtctcaaatgccagatcctgtatcttccccgctatagagcgcttatctcaaatcttcacttcccccgctgatgtgctgatgcgctgatgcgcccctcttgatcaatcttgatttatcttacgattactcctcttttctcgcttccccactcatccttggcctggaatcgagctgtcatactctgattcccctttagctcctgtggacaatcatgcatcacgcgattcattactaaaagccgtgacttaagagcgttctgaccatggcacgcgccgacgattcatactcccgcgagtcggccttccctgtcatgaaaaaccgactggcgggtgaatctggatccctccagcgccctgtaaaggcgagaccaggcattgaaaccggacgggctacctcctataggtttccgcctcgagatctcaacaactcccaagatcaattcccattcgaggttgccgacaactcgcactcccctatcagtctcaagaagcgcaactccatggcttcaggcatggctatgcatggtaccacaccgggcgaacaaccgtggaattcggaacagaacatgaatatatcctccgacgccctcgactctcgccctcacaaaagcaaatcaataaaacccaaggtccacatcaagcccattctgcggaaactctcccgagatgatgcgccgtcgacctcgattgatttgtcccgatcgtccactgaacaagaggggctgggcatttacatgaacctcgagcgagagtgcccacgcagcgagcccctcgcaggtgtgaattttaagagaacatcctccggccttcaccatcgatcggccagtggaacatctcagttctcaaatggctcaggctccagtgcgaccaagcccggatcccagtacgtgcatcccatgcgacagacgcctcgagcgtacactccaccattgggccggtcctacgaggactcaaaccgggatagcgaagaactttatgaaagccccgagtcggaaccttcgtctacacaagaatcccgtacttcttcaggcccggcccttccccggctgtcattgcagattcaagaagattctttcactcggctccccggggtttcacagaccaacgtgaccagtcgaccgtcctttgggtactcgcgggaggcggatggaactacatccccgttgtctagaacgtctctcgacttcgttttccgatctcgaacccgtactagcaccgatcctatttcgcgtgcagccacagttcaggctgcccgccaggcatttgaggaaaaagaagccgccaaaaatcgacggcttgaaaaacaacagatcaaagctgaagagagaggcccccggcgtctcttgaagcggcacacgtcggaagataatgagtctcctgtgcagtctaaagaggagatttctgaaaagccccaaagacccgttttgcatgggaccgaagagccatctgcctcatggaaatcccaatccaaaagcgcatgggttctctttatgacctggcttcgaactagagtgttcaaactgcgacggaagattaagaaacttcgttgattctgactccttccgtccaggttttcttttttctttttttcctttgtcttttcctttgttccgcccctttcctttttgttccaagttcatacttcaatgagcgagcgatttgattgttcccctggtgttgatctgcgagtcttttttgcacctttatgggaatatcgctcaatatgagcagatacacggcgtctggattgctgtctttgcaacgtatgcgtttgccatctctaggcaatcgcaggtcgagttgtcctagagatattgacctagcatttccgagggcattttattttatgcatgggaaatgagaaatgtgggatctgcttccccaatggtaccaaaccgaattatgaaatgaaattcataccattagttattcaattgtgctttgtaaatgtaaacgtcagatgttgtcaatgttgtgtgaagggatataattgtagtcacgtgccaaactgcgctgtccgcgtcttccccaaattcccccgaagactacggcgcacagcagcgacaacaaccgcctgataagctccacaccttccagctctatctatttcttttacagacgcacctccacggaggggagcgtctccttcatcatggtgtacgattggtctggcaagcgggaaatctgcttccagatgtacattcaggaaaagaaggcgttagaggagatcatggactacatgcgaacttcttgtcagtttgcgccaaggtaagtgtatatgtccttgctttcatttgtaggatactaattgattttcatcacttctctagcaagcgtgcctttcagactcaatttaaacgatggggctttccgtcgaaacaaaatccagcacacaagaatattgaactcgtcgctcgagtcaaagagctttgggaacggaacacaagccagcgggatatgcttcgcatcttgaatgatgaaggctttgagattaaagagagggaattaatgcgagtacgcgcaaagaatcgatggctgctgcgagtccccaatggaatgaagtcacagtcgaatgtcgaggaagaagaagccgtccaaccggaagatgagggcctactcgccttgcagcaggaggtatacaaggtcgaaagcgtactcgataacccgcatcatctccctacacagccagatgaacgcccaaccaacgagtcccccgctctctcaccagaggtcatcgcaaaacgccaagagcgactggaacgcctgaagaccgaaagtgcagaacgttgggcaaacagaaaacgtcgtcgtcgaactcgaggatgggccgggctgccagctgaccctccggggcctccacgctttccgtcggagacaaccatcgacgagagcaagcagtatctcaacctagacaacaccatgtaccgccagaccagggaccatttccagcgaatctgcgaagaagcaggctttatcaagaaaaccgcagccggtcctgagagatggcaagctgcgaaagacaaattgatccaagaatccccacaccttcaacaggtgtttaatacagatcctaatcaacgcgatgcaaaggcccttgcactcgatgttgtgtgtaccgatgtcaccaaacgaatgcggactctggagagacgcatgacaatcgcggaggcgaagaatgccctagggatcaacccggaggaaagtcgacagattagaaatgcgttctatgacaccttgaaggtggatcatttcacaagcaagttagaggccggcgatgaacactggagagagctcaaagagcaatggattgcaaactcagagctgctccagcaaatcctcgcccctgggccagccgacccagatcacggcaacaaactaaaggctctggaagtactctgtcgcgatgtcatgaagagactccgagacgaccagacgaagcgagatccggcacgtaggagatcatcggcccgtgccgggtctcgaaatcaaaccccgacaacctcctcgatgggcagcatgctaggcaacgacatcagcaatggaattagtactttggcctctcaggcattggccagtgcacccattacggctactgatattggcgatatgcaaattgacccttcactactccaggctgcgaacgacccatctttctcggctaatccacaccacgacgcaggcaatggctttgaatatgtggatcctatgctcagttccgcactattacatacccccgtctggtgtcggattagcttgaaggaccagtcgcaagaaataatccgaaaaccctggctcgaaaagctagccacacgaacagtggaagaactccggcaattgatcggcgccaggtatccatactcaatcatcgcccgaatcgagggcattgacagggatgaggaagggaatgagcttctcttctcaatcgacgatgatcatcaattggatgcatacttgactcatgttcacggaaggaaggcgttgctcgatttcacctttggacagatttgaactctcggccctggtggcaaggcgtagattcggttgagctaaacagcgttattacccccaatgttaggataacaaatgaaatttactgtagggaataagataaataggacattcttccttagatattaagtctccagactcaaaggcgcattactagatccttaacaccaccatgacttgggcttgtgtagtaaaagataaatcatgaagtttttggggggtacctaagtgaccatatacatatacaacattgttcgctgttcacaattccaatgttcaaaaacagaaaaaaatccctatcaaccgctacacccgtgcaccgaataagaaaccgccgtggaccaaaaccatcagctcagttggcgccgagtgtttggaccacgttcctgaagaggaccccaatagcaggcaaggagaatgatggagtctcaccaaagacactagccagtcccttggtttgagcagaaaagtcctccacgtcgtcggattgagcgaggagcctctccggtcctcggtggaagagagttgccaatccattgtcgatttggccggtcacatcacgggactggttgttctgactcttctgggaagccttgtccagacagccaagtcgttgtacagttgccgtggaatcaacgacgatgtaatcaccggaataggcatctgagagcagcgcaaccggggagctctgcagggtttcctggaagaccacctcgaaggatgggacgtcgtagatcttgatttggaatcggaccttgcggcgtttcttgtgtgacgaactagtaacaattgccaatgtcttcgttctggcattcacggcaatgagctgtgagttgccgccgggggaatccacagactctgacgactgaatggtcttgacgacatcgtcgactgtgtcccagacagcgaccgagtgagtagaagcaacgatcaaatggcttcctaggaaactcgtcgagcaggggtttccaaggaaaacacccgtgcgtcggtagtgcacagagcagtttcgcgcatcgatcaggacaacaagaccatcatttgcagccggtgtcgacggcaaacacacggccaatactgagccatcctcggagaaacccatacaagccgcctccagaggggaatcttcggtggaattgagacatccccgcaggtcaacggtaccacgacacttccacgtgttcagaggctggtctgcttggtctttcaccttcagtccgtttcggtatttcgcagttgggcaccagaagcgcagaacagagtcggcacctagggttgcgaactcgtgggcaccaggccgggacaccagaccaagtacagctgagtgatggtttttggagaaatgaggaccgtcgacacgggtgaccagttcccatgtatcagaggaagcgtcccacttccagaacttcaagaagacctccggacggagggtggcggtggatttagcattagaagagcgatctagggcttccacatcccgaggatgaggggcccaggtatcaaccgtagccaaccacttcgcatcatgcactatatctaagtggttgatatcgggtgcgacaatttgagacccttcagggctgacgctcaaagtggtcgcattggttcgcgcaagggcttggcgggaaatattggagttggcacggatatcgtatgtctgaagcacagccgcgtttgcaggctgagagccatgctggttttgagtaagctgatgggaagctgggacggccacaatcaatcgctctggttgctgcgggtgcaatttcgccacaacagatccccttgaggattccagagagccagacatgtctgggcacaactgcaatcctgtgatggtagtaagaggttgcaattctctcgtcgacaggatcatgactgaattgtcggccaatttaaccacatacgagctgccactggcggatacgacaatgttgcagataggggaggaaagatggggaaggaattgcttccggccagtgtccaattgccagagaaccatgacggactcctgaccacccgaaataatgtagtttcctgatgaatgtgagcaatctctctctgataaacatgtgtataagagtggacataccgtctttagaccaacgcacggtgttgacagagccgcggtgccaatgcagctttctaggcgaagacttcttatcgccgagatccttgccgaagaggacattcaagacattctggtacatcaggatagaaccgccgctctctcctactgctagatcgatggattccgagccttgggcctggatgtcaaagcaagtgacattgacaggaagggtcgcctcgcgccaggcgtattggacagtctcaaggttctcgagctccgcgctggttgtagtacccataaagagatgcttaccatcactagcgatgatcactcggccgtcgtgggtgaccttgatgctattgattttctggctggtctcgaggacggtggtgccttggatcttattgtcctccagtttgttgatcaaaatctgcctttttccgtccctttgcgatatgaccgagaaggaagtagcagttgtgcttccttctttccccaccgaggccagactcgttgaaacggctgtgcaggtagtctcccagtgtgcgatgcgctttccggaactccaattccacttgctgatagagcccgaagacgtaaagatatagaggctttcttggtcctcgggacaaaggccgaacccaatgatctgttggccagcctccatttgcaatgtacgtgacaggcgagaggttgaggttgcgaatacttgaacggcggtgtcgagtcccacgaggagatatctgcgatagaaaaaggtcagaatgcgtctcactatctgtcggcagaaacagtcctcacgcttcatcatcggtcaaaattggatctaaattgttgtaacgaccgccaacagggcgcgagaaagaccactgcgcggggcttttttgcttaatctcggcatcttgtatctggacatcgccattggaaccctgtttcacactatcggttggctcgaccgtctccaggctctggttttcgttggctcctgagactctacgccttttgggtcgctcttcatttgaccgggcgagcttctcggaggccgcatcgctgagccgagatcgcttttgctgtcgtgcggactgattggccgccatttttgcagatgaggcaggatcgagaaagagaagaaagaacgttcaaatgttagctagtgcgactcagacaatcatagctctcgcaaattgggacacagttgcgtagagttgagtctggggatattcatggcagatccgtctacttttttttcccaagggaaaaataaggcggggattgctggcagaaaatggaagttctcctgattgggttagatcggccttcaatcttcgcgggaaaaaaagtctggctcaaagcgacattattcacctccaatcgaatcacctcctaagctgaatcgctgaaatgattattcctgtccgttgtttctcctgtggcaaggtgagcagctgttttttgagtgcgtgatgtatgatcatttgctaaactcctgattgtaggttgtcggtgacctctgggagcgttacctgcagctcttggacgacggtgttccagatgggtatggcagcctccagtctatcacacctgtccctggctaattaactcttttacagcgatgctatggaccagcttggctgcagacggtactgctgccggcgaatggtcatgacccacgttgatctgatcgagaaacttctccggtacgtctcttatttcgagattgagtgattgttgctcattttgtacagttacaattccgccgagaaagatcgctccaaggctcaggtataggccaaccaatctctcacacgaactcgaaccgaggctttcctgtcaaaaaatcacccgaataccccattatccctaccgggtcgtgctagcccgaccgctttttcacgttcggctaaaagatattgggagcatattgaagtttgcaaaagaaggaactccagcatcttaagcttaatgatgtggtcgttggtgttggctggtctcaacattcaaatgctgccagttttggatctccctggggcagtgaagtggtttgagatgcgacgggtgacccaggctccaccggagatgggacgaagttacccacaggtgtttcttccggtatttgcatttagggcggcgttgcactctacacatatggcgccaagggaggtatctgcgttttggttattactgtcttcaatgaattttacagctcagcggtttgcaatctgacccatcaaattgcaaaatcaccatttgtagctcaacccaagtatgtgtttaaacgccactgcttggtttgtccttcgaggaacgttgggctgttgtggccgatttctctcgtgcattatggccctctgttggctagaagtgtagtcgttgtcagacttacagagtgaattgattttctggcatactcagatattaggaattgccatgttcctagcagtgtacaacataatattactccggccaaagtatacattgaatgtctaacccgatataaacgggcaaattccccgcttggacgcctccgatgatctcaacaggtcgagacctcattctagatctgcagtatacccaacatggatttatcagtcccgggttgacgggtatgaactgttggtttctacgattttggattgatcttgggatttgagaaccaaaggcgtctagatagtccgaagaacgaaccaatcctgagagctacaacttccaactcataaatctctacccgagggggccaaataggcgccgtgatgaacttgcatctcaacctccatcggccactcacatcgaggggagctgcatcagactataccgcatccaggacaaaagcgctttcatcgatttcagccaatcagagagcgcagatgtattacaataatagctatacaattacttcacagtacactttccccaatgcctttctttctgcagttggttcccaattggcgcatttgcatattgagacattgccaatgtgaaatggggactccacattcattaccatatctgatatcccctcctcccatcctaaccatccaagtatgaatatgtattggagaaacagatatcacgtgtagtatacgctaggtaagcgatgagggaccgggcccagctccctcaagtattgctccccccatcttttttttgctctttcactcgagctttgttttcttctattcccgtatacattcggccatggccgttaggtcgccgctatctgtcttaccataccgcgtcaacgccgcaagtccggcttactgttccccgcgctcggtttcaatgtaagaccagtactggtttctctaagaccatcgctgatgcgtaaacaggtctcttgacggggtcctcgatgggaatgagaatccccgcctctccgcctctgagccgataagcagcttatcaggggcctcggccaatgaagaggatggcgatgattgtgatgattgcgacgattcaaatggagaagataacgctactgaacttatacgtggatccgggggcccttctcaatcagggcttacagtatgtgcgatttgcgggctatacacatttcagttggattcacaccatatagattcaaaccgaatacccaaatcattcgggaaacagcacaacatcggacgacgatgaacctccgcagtcggtgatacatgctccgccaggatttgctgattttgtacgaataccatcagaactgttgccgcgttggctaacggtgaatctatctagacgtcaatacagcctactcccaaggacacagaggagtcacagtcgccatcagtcggtttgaatgagcaaactgatgtaataaatgtgcctacaaggccgagaaaggtattttcatgatagccctcgcccggttatatatggcgctgatgagttctatcaatacagttcggcaatagtccaatatcgccgcctccattgacaacatccctcagtctcgacaacgattgtaccgagcgagcgacgccacgtgcgcaaacaagacatgagtttgaggaattcgagagacgtagtactcgttcgagtagcttacaaggtatgccgatttttttcaagtcatactttcatccatgatagcccttactgaccctttttcaagatatccccgaaggtataaccgtgaacgaaacgcattcaagctctagcatacaagactaattttaatccaggactaaccagcaaagaggccgaaatcaatgccctaagagctgctctcgacgaatgctggacactgtgcaatacgctggccaatcttagttatatccatcgaaaacgtctcctcaaaccccaaaattatgatatgcaagaggatgcatggcggtcatgttggagactttgccagaagctttatgacacacgcgacgacgactacgcgtcacaaatccttccgactcttgatctctgtcgagatttctgccaggcgctatttgaggcccgtactcgcgacagcgacttatctgactcggtcttgcgagtgagttttgaattgaacaatcatctttacaacactcacgatcggaaccttcccgatgccttccgtgaaagaactttggatttctacattaccttgtgccaccgtctcatgaagcagcgcactcgcatcacggagacagactctctgctgggtgcatgttggacattagccgagatgctgttcagtattcgccagagcaagagagaagggaagccgctggatgaggacttgctagggtctgcagttcaagcctgctgggagctttgcgatctgttccgcgagggttggaccctccataatttgcgcaactcggatcggggaacaccccggccgagccaaaccacgttctcgcaggcattccatcaaacgtcgcaacagtcagagctggatttcggtgatgacccaatgagccaacttggcaaccccgagactccaaccaccatattcgaggacactgcaacggcctcgcccgacgacactccgattccgaatatactcgtattgggctatgggaatgggcataataacgctcatactaagtggtcatccaatgcatccagtatttcggagcagtcccgatcatccgatcacacagcatcctcggccaacacagtgaccactgtctcggaggatcccaacctcacgcgattaaagatcctgatcaccaaagctgccatcattagtggatatcaacggggcgggagccagaatctctcatcttttgtgaaatcactaccctcggatgcgtttggctccgcggcctggcagacatcattattgaagaattatagaaaggtcgtggcatttgacccggcgttcagaagtgttggtctgcaagcccgggtgagtgccattgatgtcgcgcatgcatgccaggcaatgctgcaaagtggccagtactcctggctgcgtgacctctaccggctcgtcttcgggttccatattgaagaggcgatgggccgtaaaggtgtgattatccaaacatagcactcagttccatcatatgtcgctatctagtactttttctgatgagttggcatattcaacgcggtcgacattcgaagtggggagtggggactaggtgactcttattttgtacacaacaccagtgatcttgtattcctcgtggaatattcttccctgagtttcgttggagttggggctgtgttaaggtccatttgtcaatctctttttcagcctcttttacccaagataaggcatagcaggggtatatatcaataatacatcaatgtccgaattttggcccattaaggaatcactgcttgaaacaaggaaagaaaaaccagggcaatataattctgttggaccatatagatatggatatagatatacgtagtagaactatattccgtaccaacttccctagtcaccaccaaggaaaaaaacgaagaatttcattctcagccaaaaagaaattggcaatcttctttggattagcctcagttaggctgactcttagcatatgcaggtgagatggctgatttgtgaattttgcccactttcctctggtctacaactgtcccaggcttgacctctatctttgcttttttttcctttttccttttctgtttgcccctttttcctaaattatcccagtctcaagtttccaggcatcgtgaacggacagacatagtccgagacgtatttatgccgtctcgcgcggagagccatgtttgtataaatatctttcgctcctcaccagggaatgttctccttcactttattcttctatgcattgacctatctcttcccagataggcactcagtttactatcattgaaacatccttatatccttattgggtcaccttgaaccatcatggttgttcccaccttcgccggcatgtctggcaggctcttatcgcgtgcagttaccacaactgcgacaatgggtttcctactattcggatatgatcgtatgttttgtcatcctgaactaagcactccactaataatagatctgctacagagggtgttatgagcagtatcattgatgcttcggacttcactgatatcctgaccgagttgagaggtaattcgactatgcagggtaccgtcactgctctctatgaaattggtaagctccgtcgaggatttatgtccgccttagtttccagtttgatactaaagatttatctcagggtgtctttttggtgccatcttcatgctcgtctggggcgactggctcggtcgtcgaaaaggtatcattagcggcgctatcgtcatgatccttggtgttattgtgcagatcacttcttatgctggcaagcagcctctcgcacaatttaccattgggcgtatactcactggtgtgggtaacggaatgaacacttctaccattcccacctaccaggccggtatgtattcaatgaatttgcatggaatcttgttagcatagagaaagtcgactaactctgaatttagaatgctctcgaacctcaaatcgtggtcttcttatctgtatcgagggtggtaccattgcctttggtacactgattgcttattggattgactttggtgcatcatatggtccccccgatgtgatttggcgttttcctattgccttccagtgtgtgtttggattatttattattgttggtatgatccttctacctgagtcaccgcgctggcttttcacacgggaacgctatgaggaaggtgagaaggttattgctgcacttctaggcgccgaaccagactcccacgaggtggccctacaaaagaacatcatcatggattctatccgcgcctctggtcaaatggggaagaccaccccaatgtctgccgtctttaccggtggcaagactcagcacctccgtcgtatgctccttggagtttcgtcccagctcatgcagcagattggtggctgcaatgctgttatctactatttgcctatcctctttagagactcgatcaagctggaggggaagcttccatctattgtcggtggtgtcaacatgattgtctactccatctttgcgactgcttcttggttcttgattgaacgagtcgggcgtcgcaagctttttctctacggtaccattggccagatggtctcaatgctcatcaccttcgtttgcttggttcccgacaagtccggtccagctaagggtgccgctttcggtctttttatatacattgctagctttggtgctacttggttgccattgccctggtgtgttttgagtcccaaactagaaatcaatgtgaatactaatgcgtttctaggctgtatccagccgagatcagcccgatcaagactcgtgccaaagccaacgcgctttcgacctgttccaactggcttttcaactttttgattgttatggtaactccaatcatgattgaaaagatcaagtggggaacatatctcttctttgcagcgctgaacgcttgtttcttgcccatcatctactttttctatcccgagaccgctcgccgttctctggaggagattgacctgatcttcgccaagggattttcggaaaatatcagttacgtgcgcgctgcaaatgagctaccttacctttctgacgaggatattgagcgtgtcgctatccagtatggatttggtgccgatgagatgaagcctggtggtgtttcgcaacctgaggctacctaattgttgggtgtggtagacggccctgcttttggcgaatctcgtgcggtactagatgtagaatgctctgatattttgtgttagatgcctatacaagacatttcaataaatgactagtcaagttgcagacagctttcggactcttaggaccagcaggaacatgtgattatgaaggtattgaaaaacatcagcaccaccactctataggtagtagatcctacaccaattgatatgatattgggattgtaaagaacatgaataataccgtctaatacgtatgtagagtagagacgaacaggcatctaatttatcccccccccctcctcccatttcatcatatgctagtatctcaatagaataacgtaagtgcaccgggggtgtacacacctgtggaccctagagcaccgctagatccttgtgaagaagtaaagatatgcggttttcttcatcgcttcgatatcttcaaacttgacaactttttcatcattgaacatcacccatgacaggccactttgacctggcaattgtttgcgaatcatggcaacataatgcctagcatgtgttagtctaacccaacgaagtgagaacgaagacatagagccactcaccctgcatggacagatgtgcctttgtggcatacaattgaccttaattcatatcgagcaggtaggctagtaagcccaaccgagccaccatgagactgtgcgttgtggtcgtcgatactcggtgtttccatttccaccacatcatctgagtgagtgaaaacccaatccagtgccctgttaacatcaccgtcggtcgcggccaaggctcgctgggcacgaggcgcctcaatacccatgtcccctaattgagcgatttttgccgcgtcttgctcattagaactggaggtgccgactggttcaagggccatcggttcatcgatgtctggatcttccatgtgggcaaatagccaattcatggcagtttccggatcagagttgccagtggcatgaagagctttctcacacctcacagcagggaaacccatgcctatgagttgatcgagggctcctggattcgggacaaatgcggtagattcttcaatatcgggaagttgctcctcacccgcatcatgctcaccagcaaggtaagagctgaaatccagtggtttgtcgtcgaccagcacagggatatccaactttgtcggaacccagttgacgagctcaaaccgacgagcattgaccactaattcctgaggcaatgttttgaaagacgactgcttcgaaaagccatcttggctgccacaagcaggacaggtaagctcaacgacctccgccgaagtaaagatgtctagacactctgacaaatccacagactcatattcctttcctgttccgtcagaactggtaataggacgtgcggggacagcaaccgaaacgttatcttgctcatccactttatagcggacttttttgcaatgcaagcactgaagacgctgctcaacctggaagcgaaagtcctggaccgggttaatctgcggactggtgtgtttcgataggctgacagacttgaataaatgaaggaggaattcaaatgcatcttgctgtctcatagttgagaactcctcatgaccttggccaataagatacttgaacattgctggtgctaaacccttctgatgagcgacttctggtatatccgcggacaacataacgcgagaatcaggccgagagtaccggcctgagagtagaccgtcggcaagttttcgcaattgtgtctcaaggtcctgtgctggtgcttggcagagtggtggttcttctgacagctgatagtatcgctcacgaaatccggccacagaaaatatgcattgcatgatactggagagatagcagctgttgccaagattcgccagacctgtaaatgcaggcccaaagacagggaccagctcccggccatcctcggtcgtcatggaaaattcccattttagattatgctcgacctgcatctccatcagactcttctctgtcttctcacgcccagccaaatagattccccagtgcgcaaggtgggtcgctagttctgggtctactctttcttcgttgcacttataacagtagacatcagcagagccttctgctgtgatggagccaagcttgacagccacagcatgtgatgttgagtctgcatgagtaagcccatgggagtttcccttgcttccaccgaattgacttcgcccacaacccttattcccacattccagacacagccagaggttctctcccaggtcacactctgaacaatggtttaaatctgcaatttcattagcccagaccccagttgagtatttcagggaatcaataccagtcgatgcggcatgcgtgttgtcctgttgaaccagacacaatgtatgctcgcaaggcacaaactcttgctcccatgccttgacttcttcctttcttgagaaagtcattgctgtcataacaccttcaatgacagcagggagcttgccactggctttgtccacattgtcttgggggcatgaatagcacaccactgacgtagcaatgtcatatctatcctcttccgtttcggctgcgatggaaagctttgaaatcttcggcgggggctcgtcgcgctataaatcagaggtgtgagaatcattggccacaagtccaagaaatgtttagaggctgtacctgcactttcttaggagtccttcgtatgttcaaagccagtggatggccaaatctcttgtaatgaagcagggcatggtctctgtttccagcacatccaccattgaagcaattcagacagacatttagaccagcatcatcgtccttgcaaggttagtcagacgacatgtggagtggtaggaaccgggtggcatacaatagaatcaaagcactgagtacaatcttctcgataaacagcctggtaaggtcctggcggattcagatctatggagtgttgtccattagctccatttgttcttcgattatcaaggtgatgtcacaaacccgcagcaccggtatggacacaagaggccatatccagagtggaaatctcagtaattcacgacgtgtcaataaagacttcttagcttttaacgaggacttcagaaggtgcgatagtatcccattgaaagtaaagatgggaaaaagacggaatattaaatagtgcagatcaagctaaagctacgatgcgtggggttgctccttcctcaccgcctgcacgtgctcttatcaatgttgtcctgaggcatgaagtcatgtggtgggggtgtgccacttaacgcgttattttcttaacacgcgttccaaccttgtcctccaacctggacttgctctctcaagttcggtcttccttgcttcgtttcttttttatttccctgattcatcccttcacgtcatcgtttttagtctttcctcaagtcttctttctcgactctctcaattattgaaatttgaagtcatcattatcatggcttccgaggcagcatcccaaatcactattggggctctaaggtttgtattcattggtctgtacggcagtatataagctaatcgcgtgtttaacagtgccatatttgatgaaaccaaaccccaagtaccagagccaattgttcaatgcgttcagatcaagaccttgccatctccgccgaaccaaccagaacgttaccgggctgttttcagtgatattgcgaactatgtccaaacgatgattgctactcgtacgtgctttcctctcattactcttagtagctcatcggacttactaaccgctagaagaagccactggggtggtgaaggatgggtctcttcggaagggctgtttcgtgcgactcacgtcatttcagtcaaatgttgtcaaaggaaagaagtatgtgatgcaattctatccattttgactgtgctaataatcacagtatcctcgtcatcttgggccttgaagttctaacggaactgggcgaggctgaaaaaatcggtgatcccaaaccacttgcagtcaaatccgaggaagaggaagtgggtcaaccgacaacaatatccagcaatgggttttacggctccaagatggagggtgcacaggctcagccgaatagccgagcccagccaatctctgcccctatgtctacttcctccgtccatgccacaatctacccgattgaagccgtctccccgtattccaacaaatggacgatcaaagcgcgatgcacaaacaagtccgccatcaaaacatggcacaacaagaatggtgagggtagactgttcagtgtgaatttactggacgacagtggtgaaattcgtgcaactggtttcaaagaacagtgtgacatgctctatgaactcttccaggagggcagcgtttattatatttcgactccatgtaaggtccaaattgccaagaaacagttctcaaatctcaacaacgattatgaacttgtatttgagagagataccattgttgagaaggtaacatctctttcttcataaaccaaatgcgtcgctgacattctatgataggccgaggagcaaaatgatatccctcagatccgatacaacttcaccaccgttgctgatttgcagactgtcgaaaaagacacgaccactgatgttattggcgttctgacggagattggggaggcatcccagattgtatcgaaaagcaccggcaaaccttacgagaagcgtgagcttacactggtcgataacacaggattctctgtccgcttgacaatttggggtgcaactgcacaaaatttcagtgtgacacccgagtctgttgttgccttcaagggagttaaggtttctgactatggcggaagaagtctgagtcttctgagttccggctcgatgactgttgaccctgacatcggggaggctcaccgactcagaggttggtatgatgcccaaggcaggtcggaaacctttacatcccatgtgtcaaatgcgaccaactccatgggcaaaagggatccctttaaaaccattgcgcaagttcgcgaggagcagcttggcatgtctgaaacttttgattacttctctctgaaagcaactgtgatcttcatcaagcaggataacgtctggtgctaccctgcctgcctttctgacaactgcaacaagaaggtaacggaacttgatccaggacagtggcggtgcgaaaaatgtgacaaaacctaccccaagccagagtaccgctacgtcctgcctattagtgtcggtgaccatactggccagctttggctcagctgttttgacgacactggaaggaaaattatgggcacatctgccgatgacctaatgcaacttcgcgaagacgattccaatgctttcggtgaagtcttccaaacagcgaattgccagacctggaacttcaggtgccgagccaagacagataactttggcgaccagcagcggtaagaatgatggaacgacaataattcaaataatgcgaacatcatgctaattgtgtcatccagggtgcgatatcaggtctcatcctgccagccgatcaattactcggaagaagcctctcgccttgccgatatcattgactcgtacagcattgagtaagtacaggcacagtggggaaatattattgtcctgctttgtactagctttactatttccatatacgctcggagctttttcatcaatgttcatgtgtacttttactagtatgctgctcaagctacgccatgatcatctcatttatggcttctcattttgacatttgttcgttctcccttatttagtattttaaaaacacctaaatagtaatttttcactaccatccccttccttatgagcaatccgcaatgtgcgctatcactccgtctggacaggactccaaaggttctacatgtaccgtactatatgtgaggcggtaagccaacaaaggcggaaatcaatggcattacacgattgctttttcttttttttttttttctttcgggttttctgctggaacaattcaggcagggaattcagtctcgtgctctttatcttttggttcattctaaaatactcatcatgggtaagcgaagccatcttgagccagctgagcagcgaccgaagaaaaagtccaagtctgagaagtctgagaagtccgagaagccctcaaaagcttctaaagataagcaggaaaatggcgatgagaagacagcagcttattctgatgcgtctgctctatccgatatccctcagtcagacattgacgcttttttgaccgagaacgtgattaaagtctctgatccctcctcacccgacgccacacaattccgcccaatcctttcgtttgatcacctacctaaatgtgacgctggtctgtacactcagttgaagtctttccccgcgccaacaccgattcaatccaccacctggccgcttctttttgccggccgtgatgtggtcggtatcgcagagactggaagtggcaagacacttggctttggcttgccgtgtctgaagaaattgattgactccaagtcaagcaagccttgtcaacccaaggcagtggttatctcgccaacacgagagcttgcaatgcagatttatgaccagcttgttaaattcggcggcactgagaagactcgggtgacatgcatttacggaggtgtgggtaaagatgaacagcgtcgggcccttcaaaaggccgccattgtggtcgccacccctggccgtcttaaggatctcctgaatgatggttcgattgatcttggaaaggtcacctatctcgtcttggatgaggcagatcgcatgcttgacaaaggatttgagcaggatatcaaggacatcgtcaagccgatgcccgtctccaagagacagactgttatgtttacggcaacatggcctcggtccgttcgagatctcgcggcaacctttatgaagaacccagtaactgtcaccattggcggagatccatctgcggatccccgagccaaccttaggatcaagcaagtcgtcgaggttgttgatggccgagataaggagagccgactcatgcagctgctcactaaatcccagcgtggtcatcagtcgcccgagaaagtcctggttttctgcctctacaagaaggaggctatgcgcattgagaatctcatcagaaacaagggattctctgtcgccggtattcacggtgatttgaaccaatcagatagattccgaaatcttgatgctttcaagaacggcaaagctaccattcttgtcgcaaccgatgtggcggcgcgtggccttgatatcccgaacgtgaagctagtgattaatgtcactttccctcttaccgttgaggactacgtgcaccggattggaagaactggacgtgctggggctgacggccttgccatcacaatgttcactgaaactgacaagggactgtccggcgggtatgttactcatatttctaatatccttgactggccaatgctaatgatgaatagattgatcaatgttctcaaggcagctaagcaagatgtgccagaagctctgttgaagtttggcacaacagtcaagaagaagcagcacgatgtgtacggcgccttttacaaggacgttgatatggacaagacagcgacaaagatcacatttgacgattaattgggctcattccgacttggtatttttgctggaggatttggaggacaaaatgtgccgaagccttgtcagttgacccatcaagtattccctttctatataggctctattatttttgtcggttaggcgttaagaacaaatcaacatggaatccgatcagatcagtactcacattacgagggcatagccaccacttaaggcgcatgctttgataattcccaattccaggccaaatccgcggcccaagaacaagctcgccagagcacacagaatgaagctagcaggtcgaatggcgacctcactcgtgtacaagctgcatccatttcgatggaagtaagatttgatgaaactgtaactccaaaaagttcgaaccgccatgttcacaatgttggccaggaccaatccatatgcacccaagctccctatctctaggaacatataggccgccaaggcataacaggcggaaaagacacccatccacgccgtttgcttccgtagctgttgcgaatttgccgcggatgatacgaacgcttcggtgatcccattaaatgccaaaaatggaatgtagtagcaatagacggagagcaggtctccgattttaggggaagcccattgacggcctcccaagatatgcaacaattgaggaaccatcagtgggcccaacgggaatatcaaggctgacaacaactggtacgcgcgtagaatatctacaagatgatctctggtagtgcggatatggatattgttcaacttcccatcctcatcggggctgagtagggcagagaataagttccggctgctctcctccagcggctggaagattatccgtgcaatgagaccgccatagttcgacgcaagagaatatatgccctgatcttccagtcctgaaagggctgcgagcgtcatagtgtcgccctgcgtgagcaaatgcttcactagagattggaaaaagacattcgcagcaattgacgttagctgtcgtgaaaatagtcccagaaagtagttggaggggtccctatatcaattgttaccatgtcattcttcgtggtatagcttgcactagatgaggccagtcttacctggttcgtatacgtgtcaataagaaagagaaccgagttccgttggtttctctgagcagggccagcgagtagccacaaatgagggccagcgagtagctgaggtgaccaagagcaaatggtagcacgccgaggtcaaagttgacttgagaagcatatatgaaggcaaaagatgtcaccgcacttctcagaaatgccgctggcatttcaacaacagcgcgtttttcataaagcatatgttgctgcaccactgagaaaaagggctcggtgctgagttccatgagagatgcagcgccgatcaagatcacactggggtagaagaaggcgatctttgatgcttcctctgacacgaagcgctggtaaagcatagtgaacataagactgcaaggaatcccaagggcgaggctcaagtaggacacgtttaccaccgcttgagatgccacagactgcgaatccgttgctacagcatctgcatcagaggaaagttttttgttgtcaggcgaagatggaacaggctgcctttggatagccatccgaatactttccctcgagaaatacaggatagaaacctggaagagctccagttgtgctgctattcctagcactaccggtgaaagggtgcgcaaaatcaattggttcgaggcaaaggtaaatatcctggacgctaattgaattaagatcaaaaagcttgtgcccgtggccgacgacgccagaatcttgcccatacgggcatcttcgggttttgccatgcccgtgattgaacctagttatgacgattcgtgcaataaggtgttctcacgtcaaataaatcaacaagaagactttaagccgacctcggggggtgtaggggtaaaggaaagagaggatgtggacaggtggggctctaatccagggcttgacgttttggcttaggcttttgaggaatggaagatatttgctagatgcaaatcaagaacttttttaagctgacgaaattttatatgaaaggaatacggagtaccatatagttaatctattgaatgccacttggaggtcacttgcttacgtgtagccctcaagttcccagctaggcatagttaagtatggctacaggctaattgtgaaactccttcttaaagaaccctctgtggcgtcttcggtacgtaagatttggtatgcaaaatttccatggcaaaaggaaagaggcactatgggtcaagatccgcaaagccctgtgtctcctccaagtggtcccccagggctgatccatgtcaacttccgtttgtcatcatatacaggaaacaagacttggaaagacctggtcactaggatatcaatgatcgtttgtagatcaatacgtctccaggtgttgccttgatcaagtaggctcttggacgctttagaacggaggcagatagaatgggtagccaccattcttggttttgaagacactaagaaggaagctgtatgttgtgaaaagaacagttgcccaaatcaagacagccagctgttgacccttgggatcttccatccggggaaccttcagtgcgagtgcgatcgtagcaaaggagagaacagcgtctgcgagcaaaatgttaacctaggaattcgacatggaaaggaggcccagtatcaatgagtctcacgattatcacttacagatggcagccacaatctgagtttccatcccaaactggttttggaacccaccggcaaagtagctaatgccaccatggccatcaccagcaacatatgggacctttcggatgtggttgaacatttgaccacttgtgaacagaagaatagcgataaggctgattgcagcccaaaggtttcggttctggataattgggagtatgtagggagaaagaactgcaatcgcagtcacaactgccatcagaattgtgatcgctgatacaatccgcatatagttgatgggtcgaactagctgaggcttggggccttcaggcaaatgacgtccaatccaagagtagacctggtcggctgatatcgggctattttggattgacatgttagtgagacaggagatgggcaagacccttggtagaaaaacataccctgtgaaatcaaaccgaaggggatttccttcaaccttggcgaagggaccgacggtaggagggaagacaaggagtacgggtgcagtttgaagcatgagctgcttaggttagtcgcatgccatacagctcagtctgagtaaaaatgccttaccttttggaaaatggctttgccattatcaaaatcaagtgttccaaagaccaccttgaggtcatcaggcttggtgcccttggtccagcttcgggcgatcaggtcccattcagattcgaagtcgcggcataggaggcagccaaagcgaggatccgtggcagtcaggataatcacagcatagtaatctcgaggtgtcgaggtgaggtcttcatatgatgcactgtccagttcaacaagccctgaacgagacagggattgatattttgtaaacttgtccggtgttgagctcgcagacaggacaccagacacgaccgaggaaaggagaaaaagggccgaccagagcttcattttagcatgacagtgtgctagacagcttgggaagggttatttagaaagtgcaattgattgaaaaaccatcaatcggttgcaattgaagttgtttgaacacgttgagtgataaagtccaggtgtccactatcaacgtaatcgcccggcatatcggcttacttaatatattcggggtcggcgtcggcgccaaaacacgggcgcgtcttcctttgcgacaattttatatcgtactttgacaagcattgaacataacaccacatatattacccttatatttcttttgctctggcctgtatcattttatttctaggcgttttcattctattttcttatatcgaagggctcctgtcctggacactgtcgtcatggcaatgacagaagaagcatcggcctcagatgtatgtggcttccctggattgatcctggtatagtcaaaaatgctgactctatcatgcagtttgaaatgtccataaggactatacttctagagaaggagtatgagaagaccctttcagtttccgctcgtcttctagatgaggagagggatcgtgtacgacgcatggagcttttgctctcgaaatttgagaatgaggctcttcggtcgcagttgaaggaagcaaatgggcatcttttgggattcacaagtgctgattcagaggcatgtgctcaacttcaggaggcttgccaagaaattgatcacctggagcttcgagcacaggcatcctcgattgagattaaccgactcaaggtaagtcttaacccagtctagaggccggaaacataatccgttatgttgacagcaataggaagaactatcggtccagaaaaataattcgaccagttataaaactgtccttgcagagaaacttcgtctctccagagaactttcaactttgcagtcagagcttgagcggttcagagcgcaaaatgcatcataccaagtcaccatttccgaaaaacatgagatggaacggcaaatgaactctctggagcttcaacttgataatgaaaaacatgcccatgaacgtgctcagctcaaggcgtcacagcagatgacagagatcacccagctttctgctcgagttggagagttacgggctgagctagcgggggaattacgagcaaaacagcagcaggaacaggacaaccaccaccagaacttggcatgggctaatgagcgggcgacgtttgaaggaaagattgattcgctcaaacaacaattgcggtccaccaaggacaagcttcaggaagcccaggttgaaattcagcagcgacgcaacgtaaaatcacacgcaggaaataactctgaatccagctctcgaaaaatcccccttcagcgccctggcccgagtgccggcgtgacgatcgtaacccctggtgctgttcgtgtgcaagagcaattgaaaaagcattcggctgtgcctggggacaagtcggcgttttccatcactccattcttgaaccgcacaggggcaccttcggattccccaatgagctcagttggagacgaagacgagattcttggaaacgacgacactcctcgtggaccacttggcaagcagggtacttttggcgaacagaagcgaattggttctgccctccggcgccagctatctccaacagaagaccgcattccaatcacaaaatccaccaaaccaagggcacgcgacggcgcaatgcctgtatcagcaccggataaagaggtcaaaaaaccaagccatcgcttagatcgcaggttgccacccaacgaaatcgatgaattacatgatcagtttgagcatgaacaagccaagccgaagaaacgcaaacttggtggtcagcgggatcggagcttgtttgaggaggaggatgaagaagagcctgagctcagcaagaaatttggacgaaaacttgcaacagggaatggtcgggctttaacgatggggagtaaaacacaaagtaccactggtctaccacgggcgcttgggctcggggcagcacccatagggttttctcccctgaagaaagaccgcagacgattttaatcagaagatccggcaattcattcttattggcacaggcttggtgtatttaatatgtacatgacatgtactccgtagacacgtacctagagaatgcccatgcttctaagattatgccgataagagccgacttgagtgttttgccggcagaaagtaaaaaaggtttcccaagctcccgattatctcccctgatattattcaattcgcattatgtttgctttacattcaactcgattttggcggaacgcctgccatcagcaggaaattggtcaagcaattggccaagcaagacatgcatcatccaaacgctggcaagcccggcagcaaaaggatcagttcaccagagaggcagctgtccaagggctgaaaagccgtgctgctttcaaattgctgcaggtgattcagaatcgacattactctatctctctggattagtctgacacactgttacctgcggttagattgatgagaaatatcgaatcttcaagggtgggcagacagttgttgacttggtatgctagtcgttcaacctaaactcggatcattgtttaattccgtcgctttagggttatgctccgggatcgtggtcacaggtgtgtcggctattccttatttgtctattgctgtcaaatgggccgtgattaactgccagaaaaggttgctgcaagccgcacccaaccgcatggccgagtcctcggtgtcgatatcatcccagcccaaccaccgaaaggagtatctacgattcaaggcaacttcctctcacccgaaattcaaacatatatccgagactttctccgcagtccagacagaggcaggccgcgccaacccagcttcctggacgattccagtatcagcccattggagccgaatgcagatacggaacgcactaccgaggccgagaagacggataagatgggcgagaaaatacttgaaagaacggtagatgtggttcttagcgatatgtccgcgccctggcatcagacctccggtttctggaaacgaagtctaagtgctccttataataggatgatgaacaccagcggcgtcagtttcagagatcatgctggaagtatggtatgtatgcctattactattgagtcgatatatgtgaaacccttctgactttacgcaggatctctgccacgcggctttgcgcttcagttcggatgttttgaaggcaggaggtcatttcgtctgcaaattctaccaaggcgccgaagacaaagaactggagcagcagctgaaggaattattcaaaaaagttcaccgccttaaacccgaatcatctcgcagtgtatgattgaccttatccaatttctacacccccaccgactaaagcaattgtcaggaatccaaggaggcctttttcgttggcctggagcgaaaagcgtgagactaaagctttttcggacttacgtgttgacagatcacagcatagccgaagtgccgaatcatgcagtctgtctaaaggatctcgatctcctcgttgtcagatgcctcgtcccagtcaatatcggctagtgctgcttccgccttctcatgaaccttcatattcgtcagtttgggatcaagtcgttttgtagtcatcgactgacctctcttagtccactcaattcttcgacatagccatgttcgttcaaggcttttcgcacaaagtcccaaccgtgctcgcggtatgcactgacaattttatctgagcatgcactgcagctcgaataacttttgccggtgacagacaagttctcgaaattagagagaaaccctcgtatttgatggggcacacttcctaaggggtgatcatcacgctcagtatttcgggcaatgggggctggtgcggcagcgcctcgggggtgctgaagtattgacacgaaaagctccaccagaagtgcagaggctataggagccactccagggcgggtcactgtacactgctggtcgagtgtttgatctttgatagactattccgcagtcagttctgtataaagcaggtcccttctttggataatcttacattagctggtactaccacatcgttgcagaaatagcacccaagctcagctggattttcatcctccatgataccatggcgcatcaccacaaaggaatcaaatcctagagctgcgttcatcacaattttcccagccgcctttcccatcactgtgggcagccatcgcgattctcgggtatccatgagaaggaagatagcatcatgttcatcaatcagtgtcttgagacgatcaaaatctgccctggtcgccgcttcgtccacaataggatggcctgccatgggcaccgagaacacataacctttagtatctactcccgggtaaatttgggttagggcttcggatgctcgaagtgctttttggacaccaccgttcaagcagtcttcgaaattgaatagtggctgccgaacagggttagaaaatgaaaccgtcccattgtcgacgaaagtgatcttcttcacgccccagccctatgtagtggatgattagaacaaattttcggcagggaagttgacgtccacataccagcagatttcgggagacgtagctgcctaatgtgccagcccctagcaatagacatttcgtgttcttgattttttcaagatcgagcgtcgggctgatccgccatttgataagtttgaggttgagatcaaccgactggtctgccaatcttcagtaataaaattagcatgcttgatcaagtcttcattcagtttggttatctccaaattaatgccatacctcttaggatccatgtactctgtaaggttgacaattctcccggctaatttcccagtcgagttgcgttcccaaccggtcacctttggcagtggtaacgacccttgactttgcagtgatctcggtgtctcagtctcttgttttgaacttgactccagctgaattactgtactgcgcccttgatcacgcctcgcgtgcacgtcgcgatagcgtatcaattgtaccctttcgatcccccatcgctgcttgatcagaacaagcaggtttcgtaacatccatcctggggcctgttcataatttgatgggtctgcgaaacagaaatagcggtcttcagtagcgacatttttgaaaaacccattttcatattcggaaagtgacgctatctgccagtttatatttgaagtgtcgccttgttgggcattcttcgtttcggaatcacctgaggatgcgttatcggaattctctctgacttttcgagccaaaaaaaaccctcgttgtcgaggatccaccatatatgaccatgtttccaccgcctccaccaaggcagtgctttcatgtggagataagtgtattcccttcaagttgtcaagactattatcctggtgtggctgggatacttggtctgttggttgcacggggacccattgaggatctgaatggattgctgggaaagcaaaccagtagtggaacttgtattttttgaggtctgcaaaagatacaatcacgaaactgcagagtaaggagggacaagaaagaatggttccatcatgaatggcatcccatatctggagttgattagtatctctctctaaggtatctggctaatgttgattcctaccatttgtccagcttgatagagcagtttggatctgtccatgtttcgatattcctcaacagtattgacatttttgatcatgccctctgctctgtaatagccagccgggaccctaggtcgctgttagaagggctttcagggatattttcttttatcttactcgctgctggttagggcgttcccatggatttgaatacgacacgacgcagcttcgggatcagacggacggatctcatatagtcccagaacaggccgggcggaatcatctagtttgtcatggttgatcttatgggaagccagtgaagtatagaagggtaattcgatgtcggaggcaaacggtgcgtactgcatcttggaggaacagggggagagaacgagaagaatagcttatcaactccagagtgatatagatttggaaggttggatgtagcagttagcaagggtggggggagggaggtgtaaaggtgtgtagtgaggtgaaagggtctgatgtcacgaggagcccgcggcgggggtgaaggtttatctatccacatttaccttcacacttgcttcatgtgaaaatgatcactacatatgtacccaaagccaagagctttatcccgaaaatataaataaaactaaggaggagtcctcaagttttagaggagcgaaattaaccgagacacaccgttaactcatagcgcgacatttaacaccacctcatatcaccacattctgaatgatatgagaggatgcatctcatttcgttattttttatcgtctatagagacctggccaccgtaagatgtgtcgccaactggatctatcaaaggggtccgtacttgcgaccccaaataataccttagttaatacaacgcactgatgagcaaaccaaatccccactacaaacctccaacgacgcggatgccattcccagctagggctccatctaacagctccgacgttcgcgccgtacataaagggatctcaggaagggacgacgccttcctggcaatggatcatcaattttaacgtcgcttaagcttcgcaatataaaaagatcggattttctaatatttcggattttactttttctttgttaatgttcaatctggtatgaaaccatatacgcatcttgatagtaagatagacaccagcaataagcaaataaagtagggttctgatttcgtgcagttactggtatactcaacgtgagtagccaccggcccaagccctatgtcccagctcagtggaatgcacgaggatgatatacatacatatctgcgccggtgagttgaactgcctaaaaagggacatccatggataggaggcttgattatatagtttctggtggtggatggctggttaaagtcagatatcgtagttgaatggcaaggagaagtacattaggcataggaaaccacctgtgagagaacacagctcattatcactaggccacaattaaaccataggccttttatatgtaatcatagaaagaggtgcgctgtatttatctgttctgtttcttttggcacatgggaataaggatctaaatatccgtgtgtaaaaagatcaaaagcagatagtgaaaatgcatcaataagaagatagactaagacatcatgaacgatgcaaccataggctaaccttacagacgccaagagcaatacttgtctatacagctacccaacactggagtatatgggcaacatcccgctatcaggccgataaggtcgcgtcgcgctttgctctgccccacttctttcttcttttcttctcttcttttagacagtacaatcattaaacaccctgaaaatgctcatcggcttatgtggaggtcagcagataattcttgcaaaccaaacccccacccgacacgggacgagctaacgaggatatacgtcaaaaggcatttgcgctggcaaacatgcgattgctgactacctgattcagcaagggtttcagcttcttgaactcgccgacacaccccaataccacactaccgacttagaggatgacctgcgactgcaagcgtcggagatccgaaaaaaagaccccaagtcaccaaagcttatatttcaagatgccgactctctactcgactttgcgacaaaaagatggcaagaacgctgggttactacagacattgcagatcctactaccctagatcgattcctcttgcgccccttcttcctcctcgtgagcgtggatgcgccaatcggcctccgatggaaacgatttgccgacaggttcgtgatgatacatgtgactgaagtccgagagctgattttctttttctttgattgaaaaaagatgttggagaagacaactggatccgcctgagcttgaaaagttcataatgtggaacgatcataatctttacgatcaggatactggacgtgtatacttgaccgacaaagctcaattgcgcctattcaattcctcgacaggcctcaaagagttacactcggctttacaaaccctcgacctggaaaacgaacaaaggttgaggccaaattgggaccagtatttcatgcagctggcctctcttgctgcccgaagaagcaactgcatgaaaagaagagtgggatgtgtgctcgttcgagagagtcgtgtcatcagcacaggatacaatgggacgccacggcatctccagaactgcaaccaaggcggatgtacgatacaggccagaactgaataactctaatggctctattgtccatttggctcactagaaatcattataggtccacggtgcaatcgcggggatggaggaggagtcggtctctcaacctgtctttgccttcacgccgaagaaaacgcgttattggaagcaggccgagagcggatccgagaggggacgatcctctattgtgatacgtaagtctacttcattcttctatgaactgtttcaaagacaaaatatcttactgtggatttcagatgcccttgcttgacatgcactgtgaagatagcccaagttggaatttcggaggtcgtttattctcaagggtacaacatggatagtgacgtaagtcaatgcttgttcattccaagggttctaattaatctaatttgaacatacagagtgcggctatcttacaagaagcaggcgtacggctacggcaattccacccggtagctaatcttctatgccctcatttctctttatgcataactgacttcataacagcctacaaatgggctcatcgttcttcaggcacccaagataccagtcacaactgaaacccaataacccacaatacgacagtaaaggcgcagggcatcccaaccttaagtgaagagaaaaatgcacctgcatcagtgaacatttccaccactcagggctatgtcaaagttattgtacaaagtaacttgtccaaataacattgcaattaaagggaaggggcaaatatcctagggctattagtagttaactattgtctcaagaaaatactatgactcacaggtacttataaagtatggaaggaacttagattatatagtaactttacgctttgaagaagtaccctaatgtacttattttctccgcattttgtccggcagaaaaaaaaaaggtatgactcagcgtgcggattttggcgggggtcttcaaggaacccctcgacggtttttatagctggatgcttttcggtgttggttcaacctcgatagtccaataccttacccgcttccagctgcgatcaccattgtacttttggcctaagttcctacagccatgcctaccgtccacttgctggactacgtggcggggaacatccgctccctggtcaatgcgattaaccaagtcggatatgatgtcgaatgggtcaaaaccccagaggatgtgaaaaatgccgatgttagtcaaatcccgaatcaattccagcaccattggctcatgaccatgccgttgctaacagcagaatcatagaaactgatactccccggtgttggccattttggccattgtctttcccaacttgacaaagggggatttttggagcccatccgacagcatatcgaatcggggaagcctttcatggggatctgtgttggcctgcaagcccttttccagggctcagaggaggacaacgacgttccagggcttggcgttattcctatgcgcattcaaaaattcaacgacacctcgaagagtgtaccacacattggatggaattctgcaatcaacacgggatcagatggcacaaaacacgaaagcttttatggtctgaggccgactagcaagtattattacgtccactcctatgcggccccctacaacccgggtgtattggaaagtgacggctggtctgtggctacagcaacatatggcgaggaagagttcatcggtgctatcagtcggggtaacatctttggcgcccaatttcacccggagaagagtggtgtggcggggctacgggccatacgcgcattcttgaatggcgatcaattccagtcgctctcacaggacctggtccttggcaaagaaaacgggctcactcgtcgtgttattgcttgccttgatgttcgcacaaacgactctggtgacttggttgtcaccaaaggtgaccaatatgatgtccgagagaagagtggaacagatgccggcggcagcgttcgcaatctcggtaagcctgttgacatggctaagaaatattacgaacaaggagcagatgaagtgacctttttgaacatcacctctttccgaaactgccccattgccgatacgcccatgcttgaaattctgcgacgaacatcagagactgtctttgtgcctttgaccattggtggaggaatcaaagataccgtcgacactgatggcacccatgtccctgctctggacgtggcaacgatgtatttcaagtctggagccgataaagtcagcattggctccgattctgtctttgccgctgaggactattacaacgccggtgaaaagttgagtggcaaaaccgcaatcgagacaatatccaaggcctatggaaagcaggctgtcgtggtgagtgtcgaccccaagcgggtatatgtggataagccagaagacacccatcaccatacaattaagaccgagttccccaactcaactgggcaaagctactgctggtaccagtgcaccgtcaaaggtggcagggaaactcgcgatatcgatgtgcggcaactcgtgcaggctgttgaggccatgggagctggtgaaattcttctgaattgcatcgataaagatggaagcaacagtggatttgatctagaattgatcagagatgtcaaagcttcgatcaagattccagtcatcgcttcaagcggggctggtgtacctgcgcactttgcagaggtcttcaacaaaaccaccaccgatgcagcattgggagcaggaatggtaagtttacattcttccaagtattattttctttcacaacagagtctctgaccatgtcccagttccaccgtggtgaatataccgtaactcaagtgaaagactaccttcaatctgagggattcctggtccgccaatttgaggctgagatttaaagactcggctattcaaaggtgtgatatcttcacatgggcatattttgcaaatttcacgtttttatacgagaatagagaatagatgtcatgggggtcaagtccatcaaccaagatactatacagttcaaatgtgaagcacagaaacaattcaatacacaagatgtttgagataatggattccaatagaacgtcgaagggcccggggccgatacagctattggcccgcccgggaagtcacatgatacactaaaggcggtctacagggcggtggagacagacacaaatcatctgacttttcctcacttgccacttcaccttctcctctccccgagtcaataaccgcggcgctccaaaagtcctatcctcaccacccacgcacctagcttctttcttgctaaatttcgattttttgacgataccctgtcggccttgatcaccgaactatattacttaacagctgcgacacctcggttttggtcgtttgacagcgaatttgctcattcctaacaggtctgtataactgggtttggtgtctgcaaggatcttcaaaaaggtccgacacaggtcagggtgctagggtggctctgcgaatcacttgaaggacggggcagaccatcaatctctcttgaatacaccttttttttaattcagcgccagtgttcgatcatcgtattcatcaattccttgatctccatttgtatgcagtgacctgaacactcaccattcagcattcaaaagattctcattcacacatccattgtctcagtggtctattgatccctgcttttttaaaaaatatctcgtgctttctctgtgatttgaacagataacgtctgttgcccgacctttctttgttgtgcctggtgatacaccagtttcacttcatctcacgagtttttttttcattcctctctttattatcccctattgctcactgtacacggcgacggtgcccctaaatctgggtcttaatacacctacggccatctttgttgcacccatccccctcccaaattgaatacaatgtcatcctctgttcatttcaaattcaaatcccagaaagaaccctcaagggtcaccttcgatggcactggtatttcggtctttgagctcaaaagagagattatcagccaaagtagattgggcgatgggagtgactttgagctgtcgatctacaatgaggacactagagagggtatgttactttgttccaatgtgtttcatttgctcctgactaacagcaagtcttctgagattcaatagaatacgacgatgacacgactataatccctcgatcgacttccgtgatcgcccgccgattgcctgcagcgcgccctggtaagggcggcgctgctcgttatgtttcaggcaagatgccagtcaatgctcgcagtgctcctcgcaacgaaccctcgatgagccgagtaacacccggatcagggcaatccgtcaacaacaacgtcctcgaactcaataatgcacaaacagaagaagagaagatcaacgctctgttcaacctgcaggctagccaatggcaagagcagcaacaagaaatggcaaagtaagcacacttcaaccggatgtttgattatgttggagatattaatataatttagcgcaacacccgtaccgtttggtcgtggcagagggaagcccgtcaatgtacccgaccaccctccgcctccagggtatctttgctaccgttgccgggaaaaaggtatgcacctctaatcaaatcaccccacctacagaacgctgacctttgtacgcaggtcactggatccaagcatgtcctacgaataacgaccccaagttcgacggcaaatatagagtcaaacgatcaaccggcataccacgttcacttcaaaccaaggtcgacaaaccagaatccctagcccccgatggctccaccgaagattcaaggaatacaggggtcatggtgaatgctgatggcgactttgttattgcaaagccagacaaggcagcctgggaattgtaccaagaaaaggcgaaggcatcggcggcggcagcagctgaggcggcagctgccgaggagagcaaagcattgcaagctcgaggtctggagtgcccaattgacaagaggatgtttctagagccaacaaagacaccatgttgccagaggacatattgcaatgattgtatttcaaatgccttgattgaaagtgacttcgtttgcccgggatgtgctacagagggggtcttacttgataacctcacccccgatgatgaagctgcatcaaaaattaaggaatatgaagccgacaaggctgaagccaagaaggagaaggacaaagtcgtcgcaggccctaatggtactcctatccccgacgtctccgaaactgagcccaaggagtcttccgccaccaaagagcagagcccactcaatcaaactcaagagactgcgtccacacaatccaggaaaagacccgctgaggacgagcctattagccggaatgaaaccgcgaactctgagccgggtaacgtgctaaagaaacagaaggcagatgatggtcattccgacgttccgacccaggctaatagcgtccaagacggtgcgcctggtgttgccccagtgaattttaataatcaggatatgcccttcaacagctttggaccaatgcaaggcatgcctatgatgcctttctcggctcctggattcggtaatgaagccatggggtttatgaaccctatggcgatggcgtctgccaatggcttccccggtggaatgggcccaggatggaatcccatgaacatgcctttcaatcctctccaagctggaatgttcgatcaaagcaatggtggcatgcccaacggatttcctaacatgttcaatggagacccttcaatgatgttccccatgccccagaatgggttccaaggcccaaactctggaatgaacaatttctcaaatcagcagcggacggctttcagcacaccttattcccgagaagaggattcaccgtatttccgtcaacctgtgaatccgcaacgtcatcaggctagaaaccgacgggttcggcctagtgattacagggagctttgaatagagaagtggtgatggcttgcatggatttgcattatgttttcctagtacacactgtgtatatgcatattatttacagcggcttttttttttttttcctacttattctttttttttctgtgtttctttttcatctcattctgaagaggtttctttttgaccttcagaacgtgtactactaccatggccgcaataagaataatccaattcatcatagtttcccacctttgtaataatcactttgactagggcttaggaattaatatcgagtatcatgtggctataatgccaccaatccgttcaattaatatctactgttgggcagtgtaactacttagttttaatagcaccctcttcatggacatgaaaacccggtagaaatcatgcataggacaagtaagccatgatatataacaataataattcaccagacgaagaaagatgaggaaatataaaatgatttcatattccaaatgcagagggaggtcaggtgactgggcccattcacaccgtctctacttccacaccgtccactccgtccaattccgtccgcttcccctgttcaacatcaatcagaccattcgattttcttctcaaaaaaacaccaaccgtcttcatcgtgtcttctctacttcctttaaatttcaaatttcaacctagttcgatatcttgacctacaccgctcatcaaatccctcccaaaacaattatctgaaagatcaaccatcatggcgaaatatatgaataaccacagtagtaattgcaatcaaatgcaacggttcctcgaccaagactcccagagcactgttctcgctacttgctacagtgtcgagccgtctacctccaaggtccacggcttccactactgcactaccctgggcgccggtaagtatctcgtaaccaaacatcatctatgtttctcgatctaatcttgagattaggggtacagtggtatccctgaggtcccttcggggactaaatcgtctcttacaagtcctccccacgacatcctcgattcccgcgcggatcgaacctggcctggaaacagttggccagagtacaagggggaggcaacgcataacatcccggaagagtgtgagagactcttctgtgacagactgtctgcgacattcctgggtgagaggaaaatcgtgggacaggagtcactggggatggatgcgttccgaaatgtccagtcaaatcaaatcgggctccagcatgctcgaatccagcaatggatagaagtgtgggattacaccagtgatgctatttaccgtggatttgtggctgaacacaataaggagcggaccttgttcgttttcttcgaggaccgtgcacttgaacacggcctcaagtcagggtatgtacgccccttgtgtttccttggatgcgtttccttggacaagtcaaggctttccccttttgcctagtcacagtcctccatgtgtgtttgattcacctgctgacctttcaccccccttagcttgatcgctctgttcgaactcgccgatatcgctacctttgggtgttcgcaaatagttgcctgtgtcagtcgctcccagcgcacagatgaaatggagcttgtgcgaagtttaggatggtgtggattcagcctcaccaccttggcgccttgggtctcacacagtgatcaaggaccctgccttagtaataaatggcttttcttggccgctgaagtctagcaatagcatcattgtgtgatgcgtttatttcgtttggattggagttatggattttgcttatgtcctgatgcttgagcttttgcacaaggcgactgtccttttattctgactatcgagtattgcttcttgcttccttattttgatttctttttcatgcgtattattgcatagttccatataactatacactattctaatgaaattgtcactttcccccgctttcacggggaaaaaaaagccgtgaccgatacgataagagataagttatgtccatatgacctcactcccaggcctgctttcaccattcacctaggtatacctccctttcaacattgggaagccttttaaggtctctcggagtggagcatcctatttaaacatctcccaggatgtctaaggagcgtgtcaaaagactccagttccccaagttcctccttccctcggtgttttcaaaacaaagtgcggggctttctccaacagaccgtataccccaaaacacaaagaccacgaagtatcttgacggtcatgtttcctatctgtgctgtgcaggctgtgcctcacatctttgctggacttcccaaattattagcaaaggatttacaggtcgccatggccgtgcctatcttgtgtccgcagagccagtagccactgctgtgtcggtcagcgcctcgtcttcgcctacagcctccctccccaatacggtattgcagcgtccagttcctcgccagcttgtcacaggggcacatacagtcagcgatatcacctgtacattctgtgacagtgtcctgggctggaagtatgttgcagccgaagaagaatcacagcggtacaaggttggcaagttcattctggaaaccaagaaaatcgccgcctcttcatgctgggaatcctcacctggtgtggatcagactatgaaagccgaccgccaatatggaatccagtctggcccagcaaatacggagtttgacagccaggacgaggatgagtgtgaggatctgttcgccggaatatggagccctggacttgctgcacgtcgaagaaaccgtcagatcaaacgtcgacctgcgatgtggggaatttcataagttgcaagaaatcctagggttggacctcgtgggatgaggtcattgcgtaatgtgatatgatacccttttcaacaacgttgtctcgcgtttttttctattgcatacgaatttattataatagtagccaacatgagcttgcgatctatgatttgtatttttttctctttttttttcccccggaagcctagcatttcgtacaggatttgattcattgaattcattagcactctggtaattcagatgagttcgatgatatatgaaagagaaactatgtgattaagcctcctatatccctacacagacggtgcgacttgacagggggcgtagataggtacgtatggtatagcaaggtagtagtgaagtaaacagtaaataccagagcacggcttaccctgcagcattttctctacacacttcctcgaaggcttgtatttctgttacctcctcttccacatgaataatattcctcgtggatctcaggctaatattttaaaacagaagctgatacctgtatctatgacataaagtagtagcaacaatgactcctccagctacgataacaagtccagctctagtcacaagtagaagagctatggcggcaacaataacttctccggcgatagcattactagcaggctgttaactaaggccaaatattcgtgattcctggagatcatgtgctagtatatatatcaccttgggtttcctgaacaagggtcgtaatcagagtcgttcttcgtcgtggtcaaagcaaccattagacacaagcgaatgtgctaggatatgtctttcggaaactggcatagcgaggcacaatatacgatttatctacgatacttcacggatcaagaagcatatctgcaagttttccgatatcgtcgatacgttttgttgggttaataatgaagcattatagataactagctattacggcagtagacagatagacagactatgtatagtcatttatcctatttagttcgctatacattcgatttgacgaaaacataatgaagtctgattggataaagaggatactgccagtacatttaatatctgttctggcaagatggccgagtggttaaggcgtgacgtttaggttataaacccgtcatgcgaaagcgcgtgggttcgaatcccactcttgtcatatcatttttttccccctgccgatctctgcctacgtacatggacaacaatcaatttgatcctacttaccaataacctggttaagcgtgactagcggcagattggctaggtagtagatgtgtgttactagcaaagaaaagaacagcctttgaaaacacccagcttattatgtttcttagccatctaaggttgtcaaattgacaaaacgcctttcttttctatgtccctttaagttagcataaagatcaattcctcgccatataagctttgaaatcaagggctttcggcgagaaaatgagataagaaaagaaaaccccgattcagccaaaggacacaagaccaccttgtttacgaggaagcatcgtcaacgcgagaccgcttggagtcattctccgcgggttcctcggctggtcttttcgaggcggtttcaggttgctgggttggctgctttgcaggcttacgtttgacaaaggcagacagatctgttgctcccttgctagctgcatcaagctgggctttctggtctgttgcggactgacccataatttgacccagaactccctttagcatagcctcgttggcttggtcgttctgctcaattgagacaggggttcggcgcagatcaacaagctgatttagttcattattaatgagttcgaacaatatgtggcaacggcagacacgagagaaaaacttacccgttgctccatctcagtgacgatctccttgacattggcgatctttcgctttgttgcagttgccttgtcctcatccccatctttctcggcctcaagtttcttctcctcctgggccattcggaccttgcagctcgtgatagcatactccatctgggtggcagcttccttcctcatctcttcatcaactttgggtttatcgttgttatcctcctccccaccttgttgagctgatgcgaattccagggcgagagagagcttgtaatggcattcagcaacagagggatcttctagaggatacagcgagttcctcaattcgagaacagttctcaagtcactaaccgcttctctgaatctctctgcttccaatgagatctcagcttgaagatcgtgtgtgtctgcgattctttccttgatatgctttgtgtccgtggacatcgtagtcgattttcctttgccctcatcattctcttctgcggcactcagcttcttgaggtacagaacacgggcaagatctaggacctcaaaggcattggcgaaatcgtcgtcttcttcatcgtcctcggcttggtcagcaggttcctcatcctcgtcctcggagtcgacaaaattctcgtctcctgtaaactgaaagaatggcttagatgatgtgggctctggttctctgcctgcgcgcttagtggaagacgacttttccgccatcgaattggtgatcgcgtcttggacaagggaatcactggtggatttcgacccagcggaggatatatttgttgaagatgctttgccggattgtggttgttgttcgccggctactttggagccaaggacatcacttttactcacagccacgttgtacaatgactttccgtaggcatagagtaaatcggcattctctggggataattcgccgttgagttcggcctgaagctcggtagcttgggagtacagctcagaggcagagtcgtagtctttagtcgcatctttggcagcagcctgtgcgatcaagtcatcgagttgggttcgtttctcttgctccgagactgtagattgaccgtcctgtggatcagtcatggtgaatgcgatttatgtgaagagtagtgaaagaagaaagaaacaaattgataagaagaaaagaatagcctttcgaagaagtaagagtaagattcaagtaggagagccgagtgatgtgaaaaaaagagtgggaggagattgaaagaagaagctttagctccggcgcgcgtgtcacgcgtcttcgatttaattgaattctggatctctgtctctctccctctctctttcaccccgtctcccctcttattatgcatatactctgaatcatttccaaagccttttgtactctcacttgactttcgctggagcttttgagtcaattccaactctataaggcttttgtcgcgtttcttgaagtcttgggacaatatggacgcctcaacaccgcgacatcctgatcgcttcagaatggcgacaggggatcctattccttcctcctcgcctgcatttggaacaccagcacgtccattcagaatacccaagggaaatgcgcctccccctaaaacttcgattttaccgatcttactccctccatcaaccctgcgcccaatagcctttcgaaccttcacccgcaaacataatctcacaatatcatcacccgcgcttcaactattagcagtgtttgtgggcaagaactgtggctcaggatggcgcgaggaaggcctagcagagcgagtcctggatgaggttgccaagatatggaaaagagccggcggaggcgtgattgtcgaggacgggaaaggagcgtccttaaagacaatactgcaaacccttgagagcagtatgagtgggggaagggttgttgcagggaaagcgacttcccaaaatggttccttgaagacatccaccctgggtgtagatgatgggcgggttgaaacagccgctgatacctcaaaacaaggaactgccgaggaagacgatacgcaattgtcacttcagccaagacattggctcaagatgattgatgcctttgatcttccgcgcttgacgtacaacgtcgacaagaaatacttcgaagccgtaaagtcaaagccatccttgtttccatcaccatcttacaaaactgcactattccgggatcgatacaatcttgtgtatcagcgattgctccggaatgaatcctttcagagctcattgagtgtcactgctattccttcactgcaacgttcatcgtccaatcttgcccaccgacaatcctataaattgacgccaatcgcaaatttgctgggaagaagtggaagctcgcatttactattaggattgcttgccatttcacctactggagacttatccctggtggacttgactggaagtgtagcattggacttgagtcatgcccgaatgatacctgaagatggcgcgtggtttgcgccaggcatgattgtgcttgtcgatggcatctacgaagaggaagagatggtaaaaggtgctgccttgggagggaatacaggaatcggaggtgcaatcggaggacagtttgtcggcatatcaatctgcggacctccctgtgagcgacgtgatatctcgttaggaacgagtaaccgccacggcagcggagagctgagttctagtggtggatttggatgggttgactttcttggattgggaagtgaacgtgcccaaggtgcacgaatgagaagaatccaggaaaaatgcctacgaggagaacaagacgcagcggaaacgaccaggctcaaaatcgctatcatgagtgaagtcaacctagacaacatgaagacactagacgccctgaagaaggtcttcagcacctacaatgatctatctcttcctgaacgcccacaagcctttgtcttgatcggcaattttgcgcagaaagctatcatcagtgggtgtggccgagccgggagtatcgaatacaaggaatatttcgactcattagcgctggtcttatccgatttcccagcgttgctacaacactcgacctttgtctttgtgccaggtgataatgatccttgggcatcggcattctctgctggtgcagcctcaacaataccacggcaacctatcccggagttgttcacctctcgagtcagacgtgcatttgcaacagcgaactcggagttgaataggtcacaaacccccgaacccgcaggtgaggcaatttgggcctcaaatccggcacgtctttcgtggtttgggccagtgcatgacatcgccatctttcgagatgatatctcgggaaggctgagacgcagcgctgtcaacaccactcttgacactgagttagatgttacaatgcatgagtcctctagcagtgctactggtgatgcggtccttgctgcaggtgagaacgaggtcgaagacatgggccagcaacaaggcaccaaggctgcgaccacctcgtctggggcgttaatggcccgcagactcgtcaagaccatcctagaccagggaacaatctccccatttccactaccattgcggcccgtcttatgggataatgcctcagccttgcagttgtacccgctgccaaccgcactggtacttgcagacccggaagctgcaccgttttgcatgacttatgaaggctgtcatgtcatgaaccccgggcgcttgctaccggaaggtggtactcccatggctagatgggtcgagtacgatgtgttacgcaaccgagggaagatcagggaagagcgctgttaacctagttgtaggaacgatctaattgaatttcacgcatcatgaaaggaaatacatttagatgctatgtcatatcgagacctaggaatacatcgtgaagagaaccttgtagttgctcttatattaagacggaacaggcttaagaaagctttgagttacacaaaagccatggggagaatggagatggaaatcatggatggatcaccacaatgcctagtcaatggtgatgacatcggtatttcccctagcctgtggagcagcaggtgtcgagcccttgatttggaattgtttcggggtttgctcgggtttgacttccacttctctgtcgagttggagatggggagcattaagacacccgtgcagctcgagaatgaggttctcgaccttgttgatactcgctaccgctccatctccgaggccgttccaaccatcgcctttcgattggtacagtttctcttgtataaaagctgcgacctggccgcggccagactggtccattccattggcatcccttaacatccagaccaaacggtcctggtgcatcacggcactcaagtggaaacgagatctcagtcggggatagtgaatcaggtatacagtcggttttcgcgcgatgatttgcacaattgacagatccgtctgattcgactgaggggtgatctgatctaatgaccgcagcaaaggaagcgtggtagctaagagctggagggttgattcaacaccggcttcagtgaaccgctggttcaaagccacagtgaggggctcttgaattcggcgatgagggctagagccttcgaatttgatgcccaatttcagttggaaaagaggcttagtcttcgaaatagcatctgcaacgtcgacgtagtcagacaaagaaggcccctcggcgctgatatcaaagaaagcagaaaatttgttctcgtgcccataggcaaaattaattcgtgacaaggacaaagaccgaggctccattcccttccgtatgagggactggaggatagagaggacacactcgagtcgctgcaagagttcaaacagacaaacgacaacagaatgaccggctggcacaagcaaacgaagcgcgaagccagcacccttatcttcaatgatcaacgaagaatccatctttgagacgagtgggatcaatgatttgatacgggttttcaaagtgccgtgagccatcattatgacagagcggctctggctgtcaactccatggaaaaccagtcgaaccatttctttgaattgcgactgcttctttaccccgaagggcaagcttacccggaaagcaggtggaagtgcagacgagctgtagttgaacaaaagatccgggactgtgagatcctttttcagctgcaattctttcaacgaaggccagaaatgcatggctggcaagtctgccagataacgcgcattggcatggatcgcgaggattccagtgagtccatggaccagctcggcacacgttgtgtagtcgggtcgtctctgcggaggaacgagggtttcactgatcacgtgggcctgcggaacactcatgccaatattgtaaaagggtcccgttttcgctgcctcgattggtcgaagttgaacaagccaccagcggtcaccatccatgctactggttgctgcagcgacccaatgccggttccaaagccggtgggtgaagaaagcggtccgcattacaccaggagggaacagcttgcgaggatcaagcccaagaaccctttggttcacaagttcgagaccgagtgcctttgtgccggagcaaatctcatccaccgcagtgatacatcgcactcgggcgacacgagataatatctcttctattgatgatttgtagagcgctcgatcactatcgagacgctccaacacatgcggtgtcccacacaaggtaatagaccccgacataggttcgatagaaacccgaagagaacgtgaggctgtgagttgcatatctaggcgacaatctccaggttctgttggtgataattgagcctgtagtgatagtgtgtgattcgagaaaagaagatgctttttgagggtggtgaatgtggtagaaagaagatgtgacgtgtgtaatgcgataacgctcctcagaataagctccatagacaggtcacctgagttgaacctgatggcatcgctgctgacctgctggccatcacgcatccatcggaagccgagatgagatatcccaggtttcgggtcgctagaactgccaccgcggtgaccactcttgattcctatttcgagccagctcttcggccccgatctctgaggccaatattgaacgacgagtgttcggtgcaatagctcaatacgcaacgcatctgcccaaaggccccgagaaaggtccacggcttgcttgaagaggatgttgattttattcgtaagaacgagaccgtggagaaattggaagcatcccatcaaaccatcatcgcgaagaagatcattaatcttaccatcaagttcattgaatattcgaccttttgggataggtgatgatggcgagaaaaggaagcgaatgtccacgaagaaaaactgtgattccttcgactcttccgcgactgagagatcaagttcgaattcaccagaaattgtgaatgttacccggccatcatggacccggtactttcgcagtggcggcggcactgaatcgtgtaaagccaaccgcacactgatgattcggttgagtttcagtagctttttgagtgttgctcgtgcagttagtggggtgggaggtttgtaaccgagctggtaaggatgttagattattataggttaggaacattgaagaaactcacatctggcaaagaggctactcgtccctttgataatacctccaccgctgtttttaaatccgggttggcaacttgtgctcgaacaagatcgcgtttcacttcaccgacatactgaagagctgcgtcgtatgattggtgccgtgtgcgaatgaacccttggatatcaatgagtctgctgacatctgcagcttgtcgactccattgcgagaggactaggagtttgatgaactcggctctctttgcatgagcgaaatccaagagtcgcgacttcttatgcacattctccgatgactggttaccggctggttttccattggttggcatcgaaccacccgaggctggcacttgtatcgtagccaattctgtaatcaactccgagagctcattccaacattcctgtactgagcgattgaccaatgtcccgaacggaaagaacccttgtgtgatatgtggcagcttaaatggcgatgtcggcacgatttccgctgccttatctgggggcgttcttgtatgttgattcgaagcactcgatgcgccattggcataaactgatccattcatgccggagagatgactggatttatcggcattatcaaaggcagtaggcgcatcatttctggcctcattggggcctgggcgccgaacagatccctcgatgttgacattgtccatgatgacaccgggcatatttggaagtacagcttagctgttttgtgattgtccgtcgaagctttcccctccttggccctctgcacggcgcagaacaagcgacgcaacacaggcactgctccgggctcgatctagtcggcgctggggtaggaagggaagccgaaatcgaagataaggccacaggtagatccttaatatgatgccatgcgtttcacggaccgtgtaagaagaaggccacgctcataatcggaggagcttggcgcacggcttaggaatcgaatgggccttaagacggtcagtcgaggctctggcgatgatggcaacggatcgggatcggaatcagtgcgaaatgctccggatcgcacaggtttcgacttcgatatatctagcaactagctgtgacgagaggtgcgatcggggatctagatatttcaaggataatagcagggttgtcgcaatcgaggaacgcagcaaaacaatctggtgggctgcaggaaacgaaaggcagaataactgccgaagtaaaatgaattcaaatgttcatagatattctggaaaagcagcacctgggaataaagtgtgcccagaagaggactggtcaacaatatctcaagcccaagatgatttgatttgatgaaagcgcgatgcgctgcatgcatttaccataccgcctttgatttggtgccttggtgcctggtattgtgatgtatcaatttgcagagtgtggtaatatacgatgtattattggaagtaccgctacaatcactaaaatacaacttaacactggtcctgaagttcctagtgacttcctgtaccataccttgtgaaataccccaaccccagaaagtcaacattggccgtatgacctcacctctttgataccgtcacccaactacctaccccctaggcatcgttaacccaagtcactttgaactgaattttattacctcaaaatactatatgccttctcatttgatttgtttctggccatgaatttggctttcccttgccagccatgagtatacaggagaatgtcgagtctctccctcaatatcttggtgatgacacccggccgactagcaagagggagcttgctggctggtattgctatggctgggctgccgaggtctttgtagtctgtgccatgggtacgtgtgattctactttcatagatctgttttttgcatcttcatcctagactttttatctgatctgtgaaaggttcatttcttccgataacgctggagcagatggctcgggatcggggcgttctgctgtccgacaaaacgacaccatgcagcgcaacctggagaccctcgctgccatcaccaggctcggatgcaccggtgtatcttccccaggtgtcagatggcggccagtgcatcatttacttcctcggcgctgaaatcaacacggcaagctttgccctgtatactttttcattgagcgtcttagttcaggcagtcctgataatttcaatgtcaggagccgctgaccatggaacctatcgcaagaaactcttgattgtttttgctctcatcggctcaattgcgaccatgttgtttttggttgtggtccccaaagtttacctcctaggtggactgcttgcaatcatttcaaatacttgctttggtgcgtcttttgtccttttgaattcgtttctacctgttctggtccgccaccatccatcgcttaaggaaagtgaagaggcgacaccgtcaggcggtaatgtgacaagccccaggggcaaccctttattttcttcgaccggagatatggaccgaacaaacatggatgactctacgccgctactcgggcctaacagagaagccacaaagacgtctgcttccactatcacttccctagagcttagactctccaccagaatctcgtccaatggcatcggcataggctatattggtgcagtgattttacaggtgttttctatcttagttgttgtggtcgtgcgttcaccaacattctcattacgccttgtgctcttcttgattgggctatggtggtttgtttttaccatcccggcagccttgtggctgcgcactcggccaggcccacctttgttgggcagtgacggcaaaccgctccattcgtggatctcatacatggcatacgcctggaaatctcttggaaaaaccatcgcgcgggcgcggcagctgaaagatatcgtgatcttccttgctgcctggttccttctcagtgatggaattgccactgtcagtggcactgccgtactatttgcgaaaacccaactcaacatgaagcctgccgccctgggactgatcaatgtgatcgtcatgcttgcaggagtattcggtgcattcacctggagctacatatcgaatttcttcaatctcagagcctcacaaacaattattgcgtgtattatcttgtttgagctcattccactgtatggtcttcttggattcatcccggctgtgcaacgcgtggggcttggtctccaccagccttgggaaatgtatcctttgggggccgtttatggccttgttatgggtggactgtcatcatactgtcgaagcttcttcgggcaactcatcccccctggttacgaagcggctttctacgcgctttatgcaatcaccgacaaagggtctagcatttttggaccagctattgttggcgctattacggatcgctacggtgagattcgaccggcgtttgggttcttggcgattttgattattgtgccactaccacttatgcttttggtggatgtcgaccgcggtcaacgagatgcattggcgttgggagccgaattggatggcataccgcaaagatctgagtatgggaccatatctgacgatcaaaccacgggggatccgattgaagagtgaagatcaatgtatgtgtgactgtgaagtgagaagtaggggaaattgcattaagggtctctattcgtagggttttcgtttacaactaaaagaaagaagggtattcccatagatttcgtgatgttatagtaggatatatacaatagaggccacttgtcaacaatgcgtcaaatatcaagggcatgtctccgttaccattattgttatagttgtacctgtaccttattcaagtatcttgtaccttatactcgaatttcccataaattgacctggcaacggaggtaccaggtacctgaaggaaggtccgcccttgcaaccctgcatagcccagtcacaaagctccacctttagtgaacacactgtcctcaagttcccactccccaataaaaccttccctctctggatcttttaagcttgtctctactttcttctagctttcaaccttgagcattttggttgtttgattcaagatattaattatgcggtctttcgcccctctggtcctgagccttctcggagctactgcggcagtccacgctgctgagcctgaagttgccgacactgacgccaatgtcgtcaccttgacaaccgaaacctttgatgaattcgtcaaggagcaccctttggtgcttgctgagttctatgcgccttggtgcggtcactgcaaggcccttgcaccccattatgaggaggctgccacagagctgaaggccaaggatatccccgtgatcaaggtggattgcaccgtggaagaggagctctgccgaacctacgaagttgatggctaccctactctgaaggtattccgtggccccgatgcacacaagccctacgctggtgcccgcaagtccgacgcgtaagtcattctaggtttcgggttcttgtgctctggaaattaacgcgtttcctcgatagaatcatttcatacatgaccaagcagtctatgcccgccgtctcgaacgtgaacgaggagaacctagaggaattcaaggccttggacaagattgttattattggatacgtggcttctgacgacagcgcctccaacaagagcttcacttcgttcgctgaatcccagcgtgacaacttcctcttcgctgcctccaacgatgctgctctcgctaaggccgagggcgccaagcagccctcgattgttctctacaaggaattcgatgagaaggtggccgtttacgacggaaagctggaggaagaggccatccttgaatgggtcaagaccgctagtactcctcttgttggcgagcttggtcccgagacttactcaaagtacatggcggtatgtctaacttcttctgtcctcgtatttgagcaagaaaagaaactgactttctacaacgattaggccggtattcccctggcttacatctttgccgagactcccgaggagcgcgagcagctcgctgctgatttccgtcccatcgctgagaaccaccgtggagctatcaacattgttacccttgatgctaagctcttcggcgctcacgccggcaaccttaaccttgagcccgagaagttccctgctttcgctatccaggacactactaagaacgccaagtacccttacgatcagactaagaaggttgatgccaaggatatcggcaagttcatcaaggatgtccttgagggcaaggttgagcctagcctcaagtccgagcccattcccgagactcaggagggatctgttactgttgttgttggccgcaactaccaggaggttgtcgttgataacgaaaaggatgtgctggtcgagttctacgctccctggtgcggacactgcaagtcgtaagtttttcacacctcatctaccatttgtcgcatgtctaactcatcatcacagtcttgctcccaagtacgaagagcttgctgcgttgtatgccgatgtccccgagttgaatgagaaggtcactgtcgccaaagtcgacgccactgccaacgatgtgccagattccatcactggcttccccaccatcaagctctaccccgctggtgctaaggactcacctattgagtactctggttcccgtaccgtggaggacctagtcgccttcatcaaggagaacggcaagtatcaggcggacggcctggccgatggctccaagaagcccgaggagcgtgccgaggtcacttcggcccccaaggccaccgagtctcccgcatccgatgagaaggatattcatgacgagctttaagcgcttactcgctttttgaatgtgtaacttgatatgttgtattctatgcctgaactcggacttatattcgatgccatttattccccgtagactgttgtggcacaatccagactcttgtagtggctggtatagattgaatcagtaaatagtttctccgtataattctataaattttataaatactatatttgatcatctcccagccttgcagatcaatcgcgtcgcgtgaaacgcgtcgatttcttatcgccccggattgagctcccgacaacttccaaagtcctggggttatttctccaatcttcatatttgcccatcatggtcagccctgtcatgaaacgaaaatcggagcatctctccgcccctgactcgaaaaaacccaaaggtggaagcatcactgcattctttggagctccaaagccgaaacccgcgagcgcaacttcagccccacggccatgcagctttgataaggcaaaatgggttgcttccctgacgccagaacaaagggaactattgcagttggaaattgataccttggatgagagctggctcgctcacttgaaggatgaagtggtcagcactgaattcttgaacctgaagcggttcctgaagaaggagaaagattccaatattaaggtctttccaccagaggaggatgtctattcttggtaaattggatcactctattcaggccaaatgtgtgtgctgatcatactgtaggtcccgacacacccccctgaacaaggtcaaggtggtcattattggccaggatccgtatcacaatcacaaccaagctcatgggctatgtttctccgtccgtgcccctgtacgagccccgccatcattgctcaatatctacaaaggtatcaagatcgactatcctgacttcgaatcaccgcccgataagggagggcttctcataccttgggctgagcgtggcgtcctgatgctcaacacttgtcttacggttcgtgcccaccaggccaacagtcattccaacaagggttgggagaaattcacacagaaagttatcgatctcgttgctcgggtacgaaccaccggcgtcgtcttccttgcttggggccggcctgctggaaacagagtagcgaaaatcaacaaagagaagcactgcatcctacaatccgtgcatcccagtcctctgagtgcgcataatggctttgtgagtagatcctcatctaaggacatccttggaaaccatatttgctgacaggatgatatatagttcaaaaatggacacttcaagaagtgcaatgattggcttgctttgcggtacggagaagacgaaatcattgactggagcttagtgccatccgaaaagcctctgttgcctccttgcgtttctgacaaggaagattcgaccgctttggtcaaccatttgccacaacctgtcaagcctgaggatgtcaaagcccagcctgacaatgatgatgagtttgatgacgatgacgctattgaagccctaatgtcggccgaagcagaagcttcttcgaacacaatttagacttcttgaactgcatgcatgcctgtcaccttgctggcttagaaaagtcctgcgttggctgtgtttgtttccatgttcttttacccgaggaatatttcaggagttaagaagttgggccatttctatatgtatagtagctaattttcatttcaatctattgaatgtctgtttcatcgatgtctttaattaagctcatttcaattaagctcattggttgacaacgatcttgcgagctccttatcgataagcctatctcgatctccgattcttcttctgctgagaatctcccctataagtacacctgtgatgtaaatggtttcctagatggaactcacgtggcttccggatatccctcaatcgcggagtcgcactcgagctttgcgagcttgtcccacgtgccaacgatcaaaggtacgtacacgatgggaatattgaacccaactttccatctaacctcgcaatagaaacgctgccggcatttgattcccaaatgggaacccttcaatgacccgagatcaccgccacaatcgcacgatgaccttgggaggcctattcacagaaatgactcgaatcgcgaacagcttcctgcatccgcgcacatagaccgagcgcaaacaacgtccgacagtctagctccgttatcggttcctgccaccgagcgatttgtgggagatctcaatccagaatccctgattcgcgagcgattagatgagccgactgggagccctctccgggatcgtatcgggctttggatcaactccccagctgcgcagaaagcagagcctcggggcatacagagaggacaagccacagccggagaatatgcagccaatatcccggcacaaagcgcaatcgatggccaagccattgcatcgttacttcaccaaaggtttgcggcggggatacaagcatgcgaacaactacctctcgcgacgcgccagtctttgtccgctatctatttctccaaggttaatcacatcgtgccaatagtcgaccaggaatctttccaagcccaagaagaaggctcggcgtcggtgttccttgaaaaagccatatgcctcgccgcagcaaagacccgcgcggctaatccccacttacgccttgtgccagacggcccaatcctatcgtcacgccaattctgttctgagatatataaggagctggttgtagctatggacgcagagctagaaccggatcggttgacacggatccgcgttcttgcactgatgtccttgcactgtgagggtcttgaaggggccgaggcggcatctctacatctctgccaagctatccatcaggcccagacggtaggattgcatctcggccggccgaatcaaacctccacggattccctcactaaactcttctggtgtctatggacattggacaaggtgcatgcaagtatcggtgggcggccggttcttctagctgaccgcgatatcggggtcgtaaagcccgatgtcagcgctcagacgtcgcgaggggctttcgaggtgtggcttgccgtgtcggatttgctcgcaactgtcatatcgttctaccgaccctctgcagaagccacaagcgggtgggaagagggattccctgcgtttgaggatatcgtaggggaggatacccaagatgacctggattttgctactctgggtatgtctatcatggaggtctctgctgtgctatcgtttgagctaaccgcgagtaggcttcttggagctttactatcattctgtggctattttatcctgtcggtataaacccaccgagaacatcgatagcaccagactgtcgtctgtcagacaaggactagcagctgttcgcattcactccatcgtcgcctcggagtgtgcagatgacctaccaccccttccaatcgtgccgtactctgtcaccttgtctatgggtgttgcatatcgacaactccgctcgagcagacttatcacgcacctcgaccgagcgaaagctagtcttgaagcgtgccgctccgttctagaaactcttagtccatattggtattccgccgaggcgatggcccggctgggccaaaaagccctgcaccagattcaaggcaagccacaatcctctcggacgaaccctatcggtccacagcatgtggcagaggcctcgcacaaagaagtcagcacccacggcccggtatcagaggggccagggacaattaatccggcacctcaaggcaacaattccccccgagctaagaggcaacgcaataacgaccatggaaccactgctgtgtctccgccggaattcgcgatggacgtcctccaacctccggtgggcggtctggatacatctatacaagacggatttgcagacattgacacactgttcggagagttcttagatatctctctaccgacccatttctgggatcctatttttatggaaaatcaagggcaaacgaatgatccgcagtcataatcatcatcattagaagtatatactatgtataaaaaaaatgaaagaaactatacatgatgcagcgtgaattttagtgccaagccattcgcctgtgcaaccttccatacgagaagccgttcatcaacagactgtctccaagccgaagttgcctttcggatatggtcttcattctgaaagcttcatagactcatgctcggacataccgttccccgccagatgggcgaaatcaacagtcttagtttcagcatcgaagcccatcatgttcacgttatcaacctcaaaatcaaagcccttctcatgggtcgggagaccgtttggttgtgcgttgtcatcggcaaagaaatcggtgttgcccggatcgtcaaagttaataagtgcatcgaagtcattctgggtgacttcggcatcatttgccagatccatgagttcggtgagactcatttcagagggcatagcaaaggcattggggtccttgttgtggttggcattcagattgaggttattggtgctgccgttctcgcttccgtcggagtgcggtggtgtcgaagcaaaaatgtctccggtggaccgtccgcccgcggaaggaccggagagtttggggtatgtgagatccgggatcttctgagcgagggaatccggcgggggcgtgagggtgtgcaggcgggaggggatggtggtgttggtggtcgtagagagattgaagggatctgaggatgtggtaggttgttcgcggggatttgatgaggctggagaaggctggatgtcttggggagagatagtaagctgaatgcctgctttgcgaattgcggcttcgaggaaggaggtggcgaagtcggcagaggcgtagatttcgcgcaggcgttggaggattcgcatgcattgatagaagcgctggaggcttgtcatgcggatgcttgggtcggtggacttgatgtcgaggagatgtatgatgacggctggtagaaggactgtgacaccggtggtggggtagtaccgggtcaggtcgaggcaatgcaagtcctgggcgatggcagtgatctcgactgcggcgaatcgcaccttctttcgggacatgtcttggagttcggcgtctgcggatgggtagggaacggcggggaggacttgcgggcggtgcagagcgctagatgtggtgagatagaccatcttcaacaaagcgcgatgggagtgaagcacttcgtctgcttcggatagtttcgatccgttggatggtgcatattgggtttcgacggggaggttggccagccagtcctccaattcctggtcacaacttcgtacctcgaaggtctccgcggtggatttcttcgggacgagcatcatggtggtctccatggtgccaccaaacttatggctgaggaccgagtactgggcagataatacatggctgacgcagaggcagagcttcgctttctcgatgaacatcaaggcgagctcgcgctggtggctgacattctggagaatctccgagttgccaacaatcgccacgatctcgggggagaaagggtggaattcgaagtcatcgagactcagcataggcacatcacaatcgtcatccttgacacgcataggccgtcgcatgcctagggcaatcagtcggtcacgggtgtaggtgctccaccatatccgcttccacatgcgttgccgacggatatccatccgcgagttgccgggatcccggtgaaggccgattgtgtgggctaaagatagactcacccccatccaatgccaagtgtccttttggtcgtcgggagtttcgtaccagtaggtcatgagcagaagcgattgaacaagcgagatgcggtccacctcgtagtcgaaatcgtataggagacgagcacgctggaagaagactttccgggcgaccttgcgagtctggtagccggcggcctgcagatgcttcatatcaatgaaggccacaccggcaaacatgacagcctggaagagaagcagactgatgcggtggattccatcattctggacgatattctgcaggaactcctccagatcgagcaagggcatatatgtgtggacatagtgaatatagcttttcaagagttcgttccgtagtgtcacatcggggatagtcaaggcacccttgacggccaagtagtcaatatcctctttctgaagtcgtgcgggaagtcctcggatgtaatccgggaggaaaccactcccgggtctcgtattgccgaaattggggtctaatagttgttggatttgcgaggtcacattggctaatggcattgaagcgggaacggctgggttcggagccatgcggcgtcgatagtggtcgtcggaaccgatgcgttgagcctgattttgatctgttgtttttttttggtcagccaaatggatttcttcggggtttcgagggaattgacgaacatagtagatgaggcatatgttgaccgtggtcaagatccacagaggcttgcgagggagatgtcggtaccaaatcggccaatcctgaaagatcactaaggcgggagaaaggattctcctccgagccctccggagactccgaaaggttctctatctcaatgcgagacttcctaaatcacatgtcagtgaagtttataggtaattaatttcaattgcacgaactttctgcgtttactctcggtgaccacgcactcgacctggtctaaccggcaattcgtgcatggagagccattctccaccacatcacagcgcactttacgggcacggcaacaacagcaagccttcgaggcgcgtctcttcacgggacggttatgagcggagagaccggccgtggaggcctttcgtttcccagattcagtatcggtcatggtgtgttattgtgttcgggggcgactagggaacattcgagttatatagagacaccgggcatgtgatagagagccgaaaagggaatgtcacgatgtgtgaatatgtgaaataggaaagaaataggaaaataaaaaaaaagaaagaaaaggaaaagcaagtcgaaggccgaaatggagggaatccttttttatttaattgcatcccgcaaggtttaagtatgccccaggttcccacatttttccttaccatggttgaacccgcaaacagccaaggtttgaggggagtcgatccgctaggaatagattacggcttactgttccccccaggtattacagaaaattacccagttgggtaatatgccactacaaagtcagggctaagacccgtcagactggggtaccttcgacacctctctcggcccggtcacgttacgtctgctttggacatgtgaaagtcgatctatgatatcattctctgcatatgccaatatatgagatattttgaattgcaatattcaatgtttcttttgattgctctttttctttcccatgccaagtgggccctctatcctccgaaaaacaccgggctaaaacattaataaataaaacgccgtgaagatcctaaattgcgggtcgaagtcgaaaaaaggggaattttccagtcttttctcacattccccaactgtcccaaccgccaagactggagactgagttctccagtctccgaccagcggagccgatgtggaggcattttggcccgtttgagtcgacgtctggaccgatgagtaatgtgatcagcactcttccaaggttggtttctgcttattgaacggtgtcgatatatgttgtatatacatccatcttctggactatacaacgacaatcctactccgtacactccgactatatagatcatggcagggttgaaactattgattccttacataccgactcgacctacgtaatagcacggtcatcacggctccgcacctggacagctctgttgttattattaatcttcgaggccgggccttccacagtggaacgccattatcgttccaatgctatgagacaattaaattgtcctttgtaccacatggacaatctgttctacttgtactctctgtgctacggcttacattaaatagtgatacactcagacttgactcaccaatattatatcgtgctacccacaatccacaagccccggaataatgacaacaaccggaatcgtggagtacccctgaacgccaaaatgaatttatatcccgcaccgtgttcccacccggcctgccgagttagccctcacgtggaccaaaagtgccgatttccggaagaacgtccacattctcaaagcacatcttcatgaacgggttaacggggtacccttcattacttttacttttaggactgtccattccgttttgaaatatccagagcgcaatgacgccatactccgctaaaagcctcagacctggaattcaactgaaagtccaatggagaattctgtctctcacgaggtcgaaagcggatccagtgggacgccaatcactacgatagcaaaggtcaatgctggcttcttttttactttctttttcttttctgttctgtatctctttggttttattaccggatcctcccttggaaattccatctgcttcttcccggcatattccgtcatccccagaccaaatccaatgaatcaccagatcctggggtagagtaccatgccttttcagatcgtgacctagtgcctctttagaattctttggatcggaaaccatcttgaaagtcaaaaccttatgctccgatacattgccgactctgccatccgaatcggaactggtcggttccagccttggaaggtgaaatgttactcaattgtcaattcttcagtgtctgcttccaaaccctgtagatcgtgataacagatcaaaggtacggagtaggtacataaagtggcctgcataattatgcttcttaccgcctttttctgccgtctatgtatctatgtataaaacttatccagggagaagatatgtaaaaaaaaaaaaaacattaaaccaactgattcatgtcgttctcaatgacaaaggccgcaaatgtaatcatgtggtccagcgcttaaagcaggcgtacggactgaacatggcttgcgtctaggctcggccaatgccgacttgtgatattcagtcccggaaaagcggaatgaaaactcttatattacatatccctgcacatgaaacttgcgcaaatgcaactaatcgagtcatagctgcaggactgcagagcacacaagtccatacctctcagacatgtcgtcaataaatattgacagtttgaacagctcagcagaatcgaggataatatatatcgactcccaaattgccaagcactcgataacaccagtagccagcagaccaagacggcagaccggcataattgcaccccacatttcgccagtccggggggaaggccgagtctcagccacagaccaggtcggcttagatcatatcctctttcatcccgcacatgggggaagtcgggggtcatggcgtacatgcccctccaaatgcgggggaaataggaaactccaatgagcgtgaatcattggctgtgatcgctggccacagggtatgataagtgaatatttccgcatgactaggggacgcgggtcctcactcgggccaaagtgccccatacccagcgaatttaattaagtcaccccgcgagaaatcgccgtttccggggaaaaattgaaataattattctttttttcttttcatttactttttggtacggtggcaagaattccatggttctagcgtgtatataccggtattctacgattccttctaactaatgtattgaaactgagtaagctcggaggttgtcgccaacttgggtagggctatttccttggaacctttcctatgtaggatgcctccttctactccgtacacctatgcctcttgggtgtgtgcttgtcacttctattcttgcgagagttgcggctgtggtgtacttagcatcgccacatcggttaaacttgcaaatatgcgacagactctacagacaggggcaagactcgaaccgcaagaaaaacctaagaaagtggcacagcatccctgcgccaatttctgtcgttccaaatccaataaacatgagaagacccaccactctggaatggcagcgaagatatctgcactagtcagtgagggtaatctatataaatgaacaggctagttgttagcaggacgggtgagccactgctggttctttgcctcgaaacgctctgcgctggcggtggccaagaaccgtcggcagtgaagctctacgctgaacctcgctgcttgagtgaaattcgactgatgctaagagaatacatattttgctgtgatacagcacagggagtagtatgtgctgtcatcatatagaatgttattggacaatgcatgtttctccctgcaggtactcatccgcctacagatagccagtcgtttgccccattattttcttccgatgtcagctgctcatgtataagctagctgcggcttgggaaaataaccaaggtacccctcgacatcagaaggagcatagtgactcccaaggttgtgtactccgtagactgctgacttggcatccaagactctaatgctccaacgatactaaccacttattaactgcctaggatgatcccgaggtcatgaaaagcatataatggcagttgatcaatggaatcgttatatcatttcatatctgttcagtagtgatccaattcgaattccaatcaaccctcacgcccccttgtctggaccagacgccgaaaaataaaagtagacataacatcataaaccaaatttgggtaaacgcaaatcactctgctgccggggaatcaaaaaagaccaacaaaacaaaaaccggaaaggagaatggagaaagaagaataaaagtcaaatccataaaacatctaaacaccaccacggcccatcctctcaatggaactcatgatcccgcctcgaccgggagtaggcattgcaatgccagatctgccattgccaccgctattgccacgagaatgaccgccaggagcaccgaatctagggatcctcttttccgtagtggcagggggacggatgcttccagacacagaacggctgacactgcgacgactttcatcaggggtgacttcgcgcgatggctgagctggctcgttgacgtggtcattgtgcacagaagatgccacagagggctcgcggtctcgaggctgagatgggacgggcggctgctgcatggctagccactcatcaacagcagcaacaagctcgcccttctcggcgcgttcagactccaggtctgcacgaattcgctcggtattttccttcatagcaacaatttctcgctgcagacccttaatctgggccgccatgacacgcttttcggcctcgtgcttgtcattctcgcgagcgaagagactggtattagccgcggccattgaatcagactgcgcggtatcacgttcgacgcgaagatgttcgttttcctcgcgtgcagcagttagcttcttctccgcctcgcgcaagcgcttctcccagcgagactcgtagctctttttcaaggccgcaaccttggtttcatgcttgcccttgtagagcacatgaagctcacgagcgaccttttcaacagcatcctgaacttcccgagcagtgtcttcagctgagtgagaggactgatgagatgagctggcgttactggcgctagatgcagccgcagcgcgtgcagcggaaagctgactttcgagctcaacaacttggccttctaaattttccctgtttttctcggcctcttcggcccttcgagacagacgctcacgctcacgatccccttccactaattcagagcgggcggaccgcagcactgtctccatctcattgactcgacgttcccactcggcctgttccatctccagcacctctttgccggcggcttcgttgcgcacttcttccagagcttcgccgacacgtctctccgcgtctgccactgcttgctttaggcttgcaacctcagcctcttttccgctgagagtggctttgagggaagatatgtcagacaagaatccggacttgagtgactccaattcacggggagtgaccgtgggaatggatcgaggggtaggcgcagccggaatatcaaagtccaaaagtgacgacatcttcccaggagatcgaatggattggcgcgccgatcgcataggcgaacgccgcgaagtagagaaacgggcactttgcatggactgacgagggaagaaattcatttgatcggtgaaatcaagcagattagcagagtcacctgggtgagccatatcacgtgggcctctgggtctcggcgtaggcgatcccgtaggcgaatttccatctatataggcactcgctctgtatgccctacgccctgtgcctggggtggtcggttcggcaatgtgtcgatgcccgtccatggtgggagctgggctgggagcgacacttcctcgcgttgatttcaccggcgactgggcgcgcagcttcgcaaatgtagtcatatcaggcatagcggaaaatgtgctcaagcaagtgtcatccattgagtcgtcgaccatcgaattctcgtgtgagatattctccttgtcgccatcttcatgaagtattgtgctcattccttcattgtgcctgtcctctatcatgctgttgccaattgctgatcggtcttgcacggcacttgcagcggaaaggacgctctgttcctggacactagggtcctcttcaacatctatgtggatcgctggtgcatctggtcggctcatcatacccttcttgtggcgctcgttcatctgtaaaacggcctctagatcttcaggtgtttggtcgtaagatcttttgcggggagttgcagcaactgggcgctggtcactcagtctaagtgatgcacgagaaattcggcgtgacttatgaagatcaagggtgttgtccttgggactcggccggaaggacgagttaagtactggagtaggggaagaagagttggatgctacctgtgacttcgcatgcgcatctaactttggggtatcaactgtctctggtgcttcgtcgcggacgggcgagttcggtgtcacaggtgaagaatatttagacactattggtgaatcttcttgcacatcatgtagttccgatggatcggctgtcatgttttttgcttcattgcggataggcgaactagagggatcgggtaatggccgcgattgaggaattggcgagtcactctgcatttcgcgcaagcgatcaaagtctaccgtctcttcccgcgcatcagggcggaatggggagctctccggatcttctagagctagccgccttcccaacccaggtgacataggctgaacctcgcgcaatttttgaaaccccactgtctcttcccggacatgaggacggaacggggaacttgcggggctctcctcctccaatggctcaagctctgggtatggcagaggagaagactgttgctcttcgtggatattttggaaattcactgtatcttcactggcattaggccggaagggagaactcattggctcctctacagccagccgcttgtccaagccagttgatatgggctgcagttcgcgcaacccccggaaaccaactgcaccctccgtcacatgtggacggaatggagagcttataggactctcctcctctagtggttcaagttgtgggtgtgattggggcgaggtctgtcgcatttcgcgttgcttctggaaatccacggtgtcttcgcgcccatcaaactgaaacggtgagctagcaccgtgttgatatgattcggcatcattgaaatcgtcattcgcgtgttcattttcgttctcgggttcgtgagggtagtaggtttcgtattcattatagccgttcggactcggggtagcgtgacttgtccatcctctcttcaatgggcttgagggagcaacattttccgagggctgatcaagggtcttgtgaaggaagggcgaagaattcgccatttgagattgtgcgcgcgcgttctggtaggaggatgagaggggcaagagtggatttgacattatcaaagccaagagaggccctcgagaacgagggtgaagattgttacaactgaatcgtgcgaataggtctctggtcttttttcagaactagttcgctggacaagaagagagcagagcaaggcagagtttgtgtagttatacaaaaagagttgcaaggttgccgtgttgacgttgctgggtaaacagagctagtctcaattgggaaatgtgcatcccaaactatctaatcggagtctcggactaggtatacaacacatatccctgtctttgacgacatagttcagttatatgaccagtttagctcatagtactagggatagaatataattgctacgcttcgatccgcaatcaagataccactccgatgtcttctttagatgtcttcctatatgtctttcaagcgtctttcaagattctttctagttgttatgttcttttatgtctccttacatattttttttagatagccttgctgtattggtataatatccagcagactattgaatacatgtagatagaaagcatgaccctacttggatgagtgtaacatacgagaaggacaatgccctagacgaagcctctgttgataatattaatgagatttatgattctactagtctagaactctagttctaaaaaagacccccattagaccctcgtttcctaatccgacaattacgcttctgtgtgcgcaccaccttcattgacaataatatgaacgatgtcgtcgtgtggctgctctggaagagcaacataatggcagacagccgctggctccacggttgctgatgaacgtttgtcgcgctggatgaaccacagctgtaaagcaccgaataatgcaacgagactactcccccaccaggcaagagcagtgcagccaatctcagctccagcactgtaaagcaagccagaaatcggaggcgcaaaagttcgagatgcagccccagcggaagcagcgaggccattgattttccccatgacggagtctgaggggctagcttgcttgatgagaatcaagaggaggggatagtcgataatggacaagatattgcgaacaattaaacaagcataaataccgacatagatgagttggcgcggcaaaaagaccaggaagggaaccatgaagtatgcaattggatggagcaccgtaacgatgacaaagagccgccagattcccaggtaatgtgccagcaaggggaaaatgatgctttggatcacgagggcaatgataccatcggtggacatgattacacccacagttcgagttgaaagaccgactccgcccgggatgtcaaagggcgagtggtgcgaaggtgatggccctcgggggtccttatcctgcaagaatatgggcaagagatggtcatatgtcatcgagtgataagtaaaaatagccaacgcaactacaagcataatgactcgccaggtacaagccttgggctttggtaatttctttgtcgcgggcgaggacccatcggcttgcacattccaactctcgtcattatgaaggtggacttggttaaaggtcccgtaagactccgctcgcaggtccacgccagcattggcggttgcaccagatgtaaccagaagcggctgctcagctgcctggtcgagatgtcgattggccttgccgggctgcatgtctggatgggtctcttgcaggaacagccagctaccgataatgctaaggagaagtaagacgcagcaaacaaggttgggcaaaaggtaggggaattttccaaagaggccatcggctgggaataaggatgggaagccttcagttggctttgctagcaagcctccaatggctgaatataattagcatttgcagtagaattctataatgggaagactatacatacctggaccgataatcgttccaattgaccaaacaaaaggcatgatggcatatgctcgagctggagacaagattaatccctgattccgctagatatgacataatagagatgtacttacgttcatgttctggtcgcttgacaagctcactaaccattgtttgaattactccaatgttcccattcagagctcctccaagggctcgaccggcgagggcgatccagaagttcggagccatcccaaccaggagcaaagaggccatagtaccgaaacttccagatataatgataggctttcggcctacgcggtccgaaagagcgccccagagcataccagtcaaggcctctgcgagcgaaaacgccgaaatcaaaataccggcatagaaggaggcattgttaccattggccatgtggaagtccttgaccatcacccacgagtaggggaagatagaagtcaaggcgataggctctgcgaccctgcatattgctgttatgttgtgtcagtcattgccaggtacaaacccgggatatggcatacctaggaggaaaagttgtgctgtgggaaagctgtctggcgacggatgtagtcttgactgtggtgtcaatgccatagttcttcagaagcagctaagatcttacggcaatccacccggcagtgtcgagttgatctctgcccgtaccttgtaccttataagcggaaggttttttttctttctctttctttctttctttccttctttttttaatatcccaagaatgccaatttcatttatctgagaatataggaggatcaaggtggggtgaggttgagaagtcggagaggggagaaccttggaaagatactttattttccacagccgagaacggacacaatctgatcctgacccctacctaaaggaatctggaactcttgatcctttacagatactctttcaaagagatatggatagagatagtttgaatattgtgttatactgtagtcttatctctccaaaaaaatctgagtggcgaaccatattttgttcgggtatctcggcaatggcccgtgatattgtattgttcaataatgattagttgtcgaattaataacagaatatagcataactaatgtaactatgacatatcaattatataatgttatatccagtaaacaacactgtagtctttcgatgttccccactctgctttcttatatcccagtcgaccaatcacaggccacataatcatttaagttagacctactccgtatagatcagccgcatatgtacttcacatgttataaatgattgaatataacgtcccttatatcatctaagccaaatggatcagtcagtaaaatgcgccgtcaatgacagaggaaccgcataagcggccggctattcaaggttatacttatgtccatagttgatagttgtatatgccgtgcctaccctggacatagatatattgaaagaaatcagaaatctcactattcatcgatctgaatgctaaacacaaagaatttctatccttgaccaaaaagtaagaaatgatgatatgaggggggaaaaaaaaccatgagcacagaaaaagataagtagagatgcgttcaccggtgaccaatcccctgcgccggctaatccacacatgtcatacggtccggattgtatctagataccaaataaagaaagccaaactggaaaaaagaaacaaaaaagaaacaaaatcaaaggattcacgaagtagcctctggatgcgtgggggaactagtgatttcgacagagcgggtctcaagttccttgggaagggttccagagtgatcatgagactccacatgagactcaacgataggcgtcgattcagagttcacttctaaaggctggtggaccgacggtgtggcacttgaggaagagccctctgtctgtagcttgttggaagtatcctcaacgtgttccgaagagtcttccactttctcctcatctccaataacagcagctagactgcggaaattgaacatcggctcaagagagttggtgtttccctctccagtaggaggaccacttgtgccatcctccggagtgatttccatgacagaggagagcgacgaagaagcgctggagacctgtcgcaggtgagattgtcgtgacggctcggacagatctgccgattggtttcctggtgctattggttcaagcagcgtaggggaattcgtttcttccgcggctgatggcaatgcacgatcaactcccttgcctttactagcagcagcgatttcttcaccaacgacatcttcgcctataacagaggatgagctactagtccccttaccaatactggactcgccgaggacatccaaagcggaggcgctagcattattgctgtacaagccagtcttgcgagccatcttatccgccttcttagcctctttctccctctccttctccctctttttggcctcctttcttaactccttctcctcccgtttgaggcgctcgtcttcactggccaagctcagtcggatagcttccatcatcatcatttcctcaagatcgtcgattcgattgcgtctcgagcttgatcgaggagcagccgggttgcccgctccctcttcggtagaagcagaatcggtgtcttgtgcagttgctcgaggtgtccgatcagcacccgtacgctccgtcaagaaagccaatgcattgagggcgggtgaagaggtccggccgtctccaccggtggctcttcgcattccgcgccgtccgatgccaaaaccccgtgactcactcccagatgcactggggttgatcaaatacgctgcagtgtggagggcggtcgctgccgcagatcgacgtgccgcgtgggctcgtgcattcgataatttggtggcccaatccggtcgaatcctatcagtcgtcaccacggtgggatcagtggcggatagcgaggttgcacggcggcgacctggaacggctgcggtggcggatgataaggaggaggtggaagataagggggaagtgaagttaggtgagagccgggccccggggtctgcagcataaatcaggccccgacggaatgagggtgatgaataggtgactccgaactccggctggacacagaagggacatgccgatggctccgagactaattgcgactcggtcgactcagcctgctctccctcagctgaaggagcattcgcgtggggctcgccatgctctggggggtgcgggtcagggcgcttgatctgcacgaagcattcggagcaaatgggttgatcgcagcatcgggtgtggtttaagtatggcggatagtagaggaaacagataggacactcgcttgcgtccttgtacaaattgacttcgatgggctgtccgttgacaaatgggtccttgggaagctgcagttcccggggcgttaaatctgtttgcgagttatgcttggtggtcaaagcagccaaggtcttcgcccttgttcggaaaagaggggaggtggatgtcccggatgcgatgggagatgcggagggtaatgattgaggggggttggaggactgcgaagcatctgaattaaaagattgcgatctggacgttatcggcactgtgagatgctggatatttgtcggatcggcagaggctttgtctgcggtcctggataaattgtgctccaactcgggcgggatctcatctggcaggggaatgggcatgcctcgggcagccgccataatctgatgctcagcccacgactccgagaagtcattaaggcctttccagaagggagccagtcgacgttcgatctaacccgcggtcagccttggctaaattgcatctagggggattccaagcaaacctaccatcagttggcgcaccactaccttattgtagtcttctgtccccacatatacgccctgcgttacaaggtagcctccatcgacatgctcctccttcatactgcgctccctctctttaagacgagccacccgttccttctccaagcggcggacctcacgctcttgttttgtctcccgccgattctccagcgtggccacttcacgatcatgactgctgccgattccaagaatcgaaaggtcgggcctactgcctcttgctgcacgagaaccttgatatggccggcttgagccatcggaagcgcccggggataattgacttcgacgacctgacggggctgtggagcgtgactccttagtctgggagtttcccatgttagagcccagatagatgtaataaggtggaaggatggcgagattgtcgggttcagccacgacagttccgacagtcacggtgataactccgggatatggcggaaagggcccccaaggggggttgtattgggggtgggcagtagaaatgggtgtaaagaagatggagaggtttaaaaaagttgaaaagaggctaatagagagagtggaggtaagaggagtaactttcagagcgggggggggtttgtgatctgtccggagtaactggggaaatgagatcggtgaagactttctaggacaacaacctccatgaggcccaaatgatatcaagaatatttacaaattcgagattgcaatattctgatattccaatagaaaagatagaaagatagaaataccggatgtggcggatgttatttttgttattttttaaatttttttcttggggcaagtatacctgtttgtctcatataatgcctaactagactagttatgggaattactacaaaaccacataacatgtatttatacatatctatagcatatgataggtaggataaacaggttaaatagcataaatatcaagctttttactaattctcaactcaagatcatcagttgatccatcgtcattgtcaagtcatgggcagatacactccacttccaccactattgatagtgcgatgtagacatcataggctctaagatgtagcaaaatgattgtagtatagatctcaaaatattacaattaactgtggaagtcaactagttagttaactactccgtacgtgcataactagttgattagttactggaggcaacaaggccaattcaggccaacacttaaggccaacatttgatcaacctcggaacaacctcagccaataaaatctacatacaaaaggcggtggcataaataagtctacattatttttttgccaaagaaaaaagatcgaagagcggtgttggaccaaagcttccacaaaattattttggaccttgacatcctgcataggccatgcagtagtgatagctctactcattctcactcctaccgagaatcctctggcaatgactgaaacgaccagactacatatcacgcctttcacccaggatatccttccgtctgtgctgccagcatctattcgcaacttggccacagacatatctttccacgagatttctacattcccagagaataactacggatacgtgactctgccaaacatggaagcggagaagatcaagaagaagttgaacggctcgatcctcaagggcaagaagttcaaagtcgaggcggcccgccctcaaaagagacaccgggaagaagaagatgtggtgcctgaagccccctctagtgccaagaagaagtccaagaagtccaagaaacaagcgcccgatgacggtgtaatggaaggctttgagcttcccgccgaccgcaaagtgaaacgaggttggacggagtccagtgatgctaagcaagaacgacgaaagtcggagaagaaggacaaaaaggacaaggaggagaaactgcaacccaagtccaagtacaccgacaaatccgaatgcctgttccgagcaacaatcccacccaaccgagcatccgacgcagcttccgatgataagaaggcaaagaagaagaagaagtcgaaggataatgtcatccacgaatttgagagaacggtgacccagccaagcttcctgcgcaccgcggaggaaagcgcagcgcctacggctacatttgaagatggaaaaggctgggtggattccaccgggaatctgaaagaacccgccagtgagaagatctcgaaggataactatcggcctggtcagatcccaggggctaaggagaagcgccgagctgccaaattggccaccaaagatacgaagaagcgttcgcgcaaagaaaagactccagaggaatcttccgagtctgaagattacacctcatcaagtggctcatcttcagacgagggcggtgactcagagagtgaggtcgatgagaacaaggcagatgaaatccccgaagattcatctgcatcctctgacgatgaggaggaggtcaagccgcaaccccaagaagagaccaccaagtctacagaggctaacgacggtgatgctgatacaccgagccagtcagactcggataagatacccacggaggctgcgcaagaagtgaaaaaagattcacctatcaaggaagtccacccccttgaagctcttttcaagcgacccgccccaacaacatccgataagccggcaaccgaggccgaggctggattcagcttcttcggtaatgacattgaatccgaggacgagtctcaaatggctgagccgcagacacctttcacacccttcacgaagaacgacctacaaaaccgaggtcagcgcagtgcagctcccacccccgatactactgcagccaatcgacacatgacgtggaacgagagtgaggactcggatgatgaggacatctcgatcgacagccctgtcaaaaaagctcgcgcggaagccggtgcaagcatggaggaaactgaattcgcaaagtggttctgggagaatcgtggtgagaacaatcgcgcctggaagaagaggcgacgcgatgctgctaaggaacagagacagagagacaaccggaagaagggaatcaaggcaaagtcatagattcaaaatatgtacctagatctgatgtggtgcttatacataaactatgctgctagtagccttcaaatgacacaaacactatgtaatttaagccaacgacgtttccaacgttggtcaaatctaaatataaaaaaacctcatggtctttgttggattgcgtacacagtcatgtgacccgcattcatcatcattaagctcatccaaactaggactcgtcgcatcgtccactacgtgcccaggatgttttcgacctggacctcacagcgcagcatacagctgttgttgctgcttttcacatttttgtctctcacgtcattggtagcagcatctagtaagtgctaggctctcttctccgatgcctcgaagcgccaagtcgaagatcgaattgctaccatcttcgcgtcgatatctatgtgatactaatactcaatgctaacagcaccaacctccttctgcaaatgcacctgtttctccaatagtacgatcatccccctcaatcctgccaagtccgaaagctcctccggcatcgaccacgtccgcttttacgagcgcgactctctcagctccgagcttgagcataccgatgaatacagcaaacgagccgagaaataccgatctctgaattgtaatgattgcaatcggaaattctgtctcgactacgagctaccaacatgcaaaggcgctaaggaggaagatgtgtatacgacttgcttccgtaagtgatttgtcggactagcgaatcagccaagagaaatcgaattggatactataacagatttgctgacggatctgcggtactagagcgagattcacggaaagacgaggcggtggtgtttatttttatttttgctaccggtggactgctggcttgggcagcctgcaagccatggattgagcgatatgtcgaggtaggtcgatgcaaagcgagatctgtgagaaacccgactaactgatttaggctgcacgagaacgcaggtcgtatatacccgttgctgaacccgatcgctaaatatgaaatgatttgatatgattttgaatgtacaattttgtaggctgaaatatctagcaaagagcgtataattccaagacttgagactaaattcatcaacatatacaacatacggagtagggatgatgccatggggaatttgagctcgatatgatatcagtaggaggaatgtactataagttcaggggtaaacacatcaacacttatcttagtatacctcactagtaacatactcgcataatctacttcgtactagttagtaagttgtggtagatagatctatttatttagctatttagcgcttctagattgctacagatccaatccccactacggactatctgaaacaggatagattgggggttatggccaaccaatagatccgatcagccagagagaatgtgatttaataggcattgggggatccttatatatgtgcacacattggatcggctaacaattgccaatcgagtggattcagagagaaaacttgtttaattaaattaaatccttttcttgcttttttttctctaatcttcctattcttctctccttaaattgctctctcttctttaagaggcccgatccccttcatatccatatcggaactggtggcgttgattttttttgtaatatccagcgatagtatatactggaattcaaaatatggctatcttcgactcagaaaagcgccctcgtggccttcgcgtgccctctctcgcagcattcaagtctttccagaagaaatcgtcggaatctgtgcccaccgagcctgtgccctccggggagtcaacttcgcctaaagcgacagccttccctacccctccaccaccgaagccggcgcccccgccgggcaaggacctcccagtgcccccgaaagaggaaattcccacaccgcagacctcaaccaacaacccatacttccctccgatcccctcccaaaatgcagtcccagaacgacgcccaattgaacgggtccccaatccaacgcagtctcctccccctcggatgacaggcctgcgaaacaagaaatcacagcccgatttccacgtaccccaacaacagacaacaaactatttcgcgccccaagctccggccgacgaggccaactcccccccgctggaagacttcatcccgaccccggacagcgccgaaccgccactaacagtgtctgaactgccacgcgatgagctgtccccttcgcccttcgtaccaccggatgttgaacccgtggcgccgaaattgaacgaaatccacctcacatgctaccagcaacaccgcgctatgcccgtagcgcagaatgcgtggtgtccgctgccgtgcatgacttgtcagaaatttgacattgagatccggcaccgttgtgtgttctgttgcctgcgcatctgcgagtcgtgctatcagactctgcaaaaatgcaagaatcgatccgtcgaagaactggtcgatcggctggtcgtctgatttgttgatatctcaaggtggtgttatggtcgtggtgcgttgacctgaatgacctcagcatatattgcatgatctcttgcgcaggaagtacagttcctgtaaggttgtcagctatgttttctatttttcttcttatctgtatacctttttttatgataccaagagctcgtgtatatattatgttttaatcaggaggaccgaagctgcatgttaatatgaatagatattctttttttggggggttccttgacataagtgtagcatttcgtagagatatctgagagtttggagaagctatgtgctaggtcagcttattgccgcgtcaagaatactcccatatggtacaaacgtttctgagagatcaatcgtgatcctcctcggtcagaccaggacacccttccagctcaagatccgtttcataggcatatttgcaccagaaacaataccgatatgtctcgcgcagaaagagaaccagcttgcgtaaccgctcagctggctctaacgcattgaaggcatcgagctcctcgtcgtcttcttccagctctatctccattgtggaggtattctgatccagttcactgccaagggcctttttatcctcccgatccatagtagggtcatcgtattctggtagccgtgctttggggaaaaatgaagaagggagtgaggattggagagcatggcgtgtctgacggtcactgtcgttcctttcccgctcacggatgagacctcggtatagaacgttgatttgcgacgtgagcttgattggcttcttctttgtcgcggctgcgttgggtccgtcgcgtgcttgactaggatctgcggagtcaccgccttctttgttggacttggctgaggaccctatttcttgttcttgatcttcgtcgatgatagccccactctccgattccgcatccagcctctctgcaactttctgcgcagcacgcacctgcgcttcgatgcgtctcaactcgcgctcttcacgaacgcggtctcggtaacttccttcctcgtgtttgattttctttactgcttcttctgcctcctcacggagcttgcgttttttttcagtgtccaacccgattccgccgcggttttctttcatggttaggttcagcggttcagcgcgcgcctttaggaaagaatcggtagtgacactgccagaatcgctcgctgcaggaggcttgccaagcaccccaccaggcttaaagccaagctttgccatcatttggaatcctttgttggtggggttgagggtacttgtggccaaggcttcctctcggcgggcggcttcccgagcagcgcgttcggctttcgatgggactcggcctcgagcttcggcctgcatgtggaaaagaatgttagaataggtttggaatctagccggagacagcgttgggctagaatgtgaaggatacggcacctctcgtagttcgcggcgctttttttgtgcgaaggtctccttttgagagggctcctcaatgaccatattcatgtagtcgtcttcatcttccgaggccattgtttcggttgccaagagtcaaggtatggcctagacgctaaagaaggggagagaggaagaggaagagatccgcaggcggacaaagaaaacgctttgggttttgcggggaactacggtggggctctgattaattaatttggaggctctgattatatacaacgctattacactattaatgtacactatataacatatattatgggattatagtacttaagaagaaatatatcaggtttagtagcattttcttcggtcttttatcggggaaaaatgtggaaattcggattaaaatcagctagttatatgttatagaccaaaacaaagacgctatttatgccaaggatcactgtctatctttgtttatatatttagactcgatggtttcagatgtttcccaacgtctcacttatgtttcttaccttaaagactatatagatatactgttgcttttgtaatgaaatacctcccaagagcatttaaaccatgattttcgttcctgttacttacttctgaggccaaatagcctgctcaccgctaaaattacatacctattatgtctattatggatggtgttcttccccgtaaagatcccttactgtacatgtgacacatccccgcaagcgtctgtttgcatatctcaatgaagcaacagtggcgcaagggctttgtctttgtatcactgtctaatagctgagttcggtgcattgtcaccgtgacttcgatagacaatgctcggcgttttctcttgtctccgcgggaccctttataagccatggcatcgaccggttgacaatcagactgtcagtcaccatggcgattttcttgtatatctgctctttgctatctctagcatctgcttctacggtggtagatctcggctatgctagctatgaaggtcgcacactatccaccggagtcacacagtggcttggcatgcgatttgctgctccccctgtaggtgatctgcgatttgctgccccgcaggatcctttgactgtgaagggaatacagcaagcaaccgaggtatacatctcttgtgttcggttatctataggtggctactgactattcactgctagcatggaagtatatgcatccccacagcagcaagcgaaggccggacagtcccagcaggaacatcagaagattgtctgttcctcgatatatatgctcccacagccgcagcaaaaggctcaagcaaactgcctgtctatttctttatccaaggaggaggctttgcacttaattcaaatgccaactataacggcactgggttgatcaaggcatccggaaacaatatggtcgtggtcactttcaactatcgggttggaccgtacggatttcttgccggagatgaggttgaaaaaggagccagtctgaacaatggtctgaaagaccaacgcaaggccttgaagtgggtccaggagcatatcagcaaagtaggtcaagccgtcattcctcatttttttttttcgtggctttgttgtttgatacctggttttgacactatcccagtttggcggagaccctaaacatgttgtcattggcggtgatagtgcaggtgctgcctcggtgactctcatgctctcggcgtatggtggcagagacgaaggcctgtttgttgccgcagctgcagagtcacagagctttgcccagatgctcaacgtcaccgaaagtcaatttgcatacgacgcgctggtaactgcaactgcatgtgacagtagtcaaaataccctggcatgtctgcgcaacctcgatgtcaatgctttgcagcagaagaacatcaacagaccatacccaggagcaaaggggaagccgttatacctgtatagccccacaatcgatgaggatctggtgccagactacacgtaccgcctcttccatgaaggcaaattcatcaaggtacctgtgatatttggcgatgacaccaacgaaggcacgaaattcgttcccaagagcacctccagtgtcgatgaagcagatacgttcatccagaaccaatttccagcaataacacaggcccaacttgccaagctcaacagtatatatcttactccaaaccagaaggagacattccctggcgctggggcctactggaggccggcaagcacggcgtacggcgaaatacgttacatctgtcccggaattgacttgtcttctatttacgcagcggcaggtgtcccaagctggaactaccactacgcagttcaggaccccgccaacgagagctcgggagtgggcacacatcacaccatcgaagtcaatgcgatctggggtccgaccaatactaaccaaaaagctccagcttcgtactacactaccaacgcacccatcgtgcctgtgatgcagggttactggacaagcttcattacgtctctagatccgaacaccaaacgtcttccttccagtccgaaatggcagacctgggaccaaggtggtgatgcatatcagcggattttcattcgaaccaacgagacgaagatggagacggtgtcacaagcacagagaagccgatgtgaatatttgactagcattggtcttgatttgaagcagtagcagtatatatacccctgggagtaaatgaatttgtgatctactgaggtcaggccttttaactaatcgaactcctactaaatgaccatgaactacttaggtacctctacatagtgtttttctatgccgggtgcgtatgtagttcaatctacgggatctttacagcaggagatcgatagtgcacctaagcactcgtgaatcagtgtcggtctccgctaaagtagacgaagaacaattcgaaagggctcttgtgcctagtccccacgacctattccaggcaattgaaatgcttgcatgcgacagcggtcacctgggaattaaagtccattccaaggttaacaccagaatgccctcaccaaaccaagattctgatggttccagggttccgcctagagatggaaccaagaagtgcttgtttgtttcgtttattcttttctttctattctctaaccttggaagtctcaatcagggagctcaacatggcctaccgagacaatatcgtcgtcagaggaacctaacacagtcttccctgctgactttccggtttgtaaccgcctgagatcatcaccagcctccgagaaatccaagagagtgacaggagaaggtggggagataatcccttccagatagaactgaagcgtgtctgctaacaaagtctgaatggtgggtggtcgaagtttcatcatcacgacaaggtcccctgctgcggaagtaaagccgccggtaaatggcttcatgtcaagtcgtccattgccatatatatcgcgttttttgagctctatgagcctccctaaaggcgcaatgcagctccatgagtgacgcaggagttcaccaccgagggagttcaaaacaacgtcaacgcctctttctcaacatctagaatgtccttttgttcaaggcactcaaggtccttgctttcagtctacccaatggcaggtagcacttctgtcaagagttcgatgacttgaatccacatgtgtaagaacgacgtccgtgaattgaatctgcattgttgaagatgacttgtcccaaaatgttatgtcgcttttcagtttcttcaaaaattcgagtgtagcattgtgacacagaaactcgtggctaggctcgctactgacatcagacgcaatctaaatttctcaacatatccatggatgccgggagatatacaaaccgtattgttcatacaacaatacaaactctattgttctgtgaataatataaaccctgttatttacggaacaatacaaatcctattgttcacagaacaatacaaaccttggtacctatccgccaacctctggggtataaacagggctctcatacttcttcttcttcttccctccccacccttccaggtttcttcaagtctttacactattcatcttctgctacaatcttcactctggtatatcacttcactttgtaccatcagttcactccagtacatcatcacttcttcactctggtttatcacttcactctcagtcgtcatcttcagtcatggacccctcagtgccgtctctagggccttcaggccttcctacacccccgctgtctcctcgaaaacgacgccgccaccttcgtgagtccgatgatgcagaaggtgacatgagtcttgagcagtacttgcagcgcgtcgaagtttaccgatcgaccagtatccccagtcggtttccttcgccagtaaaactggaggttctcccttctcttgagaaagtactcaggccactctaccctgaagtcagttcgatactgaaccaacacaatctgccggggatgatgatgtatcggtgttggaggatgaccaagccggggtatccccgtggtgacatccccgtcgatattttcagtgtcctccttgatacctcgactccaaacatctctcctcttggccctatcaaagacgagatcttgagcctcttccgtcgacacaaggtcagagtgcatgtcgaaatttcgaacgacaagctctgccaccacccgacatttttctctatcgccttaaaccaccctcttgtcaaagcatacgaccgagtcatgcagaatcttgtcgccatcctgaagcagacacttggttccaacttcaatatgctatgccccttcaacgttggtccgaatgaagccaaggcgcagccgaccattgtggtatttgtggagccatggacgattacaaactggtttgagctgcgacttcaagtcatgtctcgactcttgccacacatacaagcggacagctttgacatcgaatttttacccggcgccatgtcattcctgaatggaggcggcattccgttcacacacaacgtcaaagagcatgaggttccccgaatgggatcctcgatcggaattgaaggagacaaaaacgccggaacgcttggcgggtttgtgacattgactcacggtgatgtcgttcgtagaggttttttgaccaattaccacgtggtcaggccatcgccgtcccaacgcccctctgacagcaacgatttcctccaaagtctcgaccgtttcggctcctcccctgtgcgccctctggccaacaaaatcacgatggaatcgccatctggccttgataaagacgccaccgctgcccacatttccgagcgcttagaggcaatgcgcgaacacgagactgaactgaatgccaaggtgcaagagcgagagctactcggagctacaccaaatcccggaatcctggaggcgctttcaaacacaaaagattctattcaagaggcgttgcttctacgttcagtcgtcgaccgaatgccgttcagcctaggtgatgttcagtttgtgtcaggatatgaagtgcacggtggtcacgttatagactgggcattcgttcagatgtctaaagccgccgagccaaagttcttcaggccaaattttatgccatcggtccctaagaagtaccagccagagaaatggagcccgtctcaaaattctgcaatctggctaggaaagaaacctctcagtgagtttgggtcacttaaagatggggattggtgttgcaaaaaaggtcgtacttctggctttactgcaggtgtagtgaacggccccaaagcatactgcaagtggaatggccctgaagtaagatatactccgagcggacaaaaagttgaaatgcgtgctcttgaaactcaagagttcgtcattgtgggcaaaagagctggggtaaatgaggaatcgttctgcacggacggggactctggttcattcgttctcggcgagagtggagaggtcaagggtttgctgtgggggggtatggagaaagacaaatggaatttggggctagcatcaagcatgcctgatgtcatggcttcgatccaggagaagatgggagggtccgttacattgagccttccggcttgactcattgatctttcaaatctgtggacatttgcttccaaggttctgtgcttattgaactctagttgcattgcttcgttgaaccccattgcgtttttatagcttcatttgacgtccagtaccatgtgccctgacataggacgtatatttatacccgagatccgtactcttgtaggtatactgtatacctgggctggtcatagaagcaaagtggcaaatcattatatgcgatcaagattgccgtcgaaggagaccgacggagcaacaaataaaaagaatctaaacaacaaaatatctattttttagcactcagatggaaagggaaggccaagaagtggcagaggaaatccgctatctaggtagcggattttgtagatactgtagatcttgatgaacttgacttttattcccacccttacgccggatgaataatgatatatataccagcccaacaggatgtacaaccatgtgtgatatatgaaaaacagatgtggaacataagttgaaatgcaagattacttcctgccacgcgcccgctcgtactcgttggcagcacggccctcctggctctgaatctccgcaaccagacgcttgtacttcttctcgtactcggaatcgcgctctttcttttcgcgcagctgctcgcgagcaacgaagctggcgtccttgcgaagctcgcgcatggcacccttgcgctcgcgcttgaactccttcttgagacggttggactcggcacgctcgcggtctggatcgtagtgcttgtctgggttgaagttctcctcgaacttcggaatggctgttttgatggccaagggtttgtggtcgtgcaaaaacagcggacgacgaacaagacgagcttgtgcgaggtgggaatcgatcttgttcagggtgctctggatgggttcccgggctgctgagtataccttgcctctgagggattggtggaggtgctgcagaacggcacggaccggtgtgaagatctcggtgaaagcagatttctcggcccaaatatcggaagcggagccaaggagagacacgagagtagcgaggagggagatcttaagctcctcctgcgcctggggatcagaaggagaagtggtcacgtcgcggaattgcagcttgcgaggtgtcaccttcttggagggcacgagctgaacagattcctgtgactttctgtaggggaaagctccaaacttgacagtcggttccgtgggagcaatattgcagagagcatttagagtgtagttgataaactcgggcatatatctcttcgaggttttttgatattggagacaaagactcgcggcatatgtaccacttgcaaggtctgtgagcgaggcggtggtgcactgacccaggtaacgcgctaggcatagatgagcgggtgtggctgtcgtatggaagtgatcagatgtggggaagaaggtcgagaggccggtaagcaagatgaggtcgccgggtaatagattgagtgggcgttccttgccaatctcacgaagttgggctcggcacgcaattgtcacattcaaaggatgggtcttagccaaagaatgaatgtgacggatgatactctccagaatggcaaatggaggttgctcagtctcgttacccatgtaagaaacatgctcgacaagaacttcagcaaatcgaccaagcttgtccttgtttccaggcctaagccgtggatggtgcaatgctcgaatgcgctggataacagtcgggatttcctcgacaggtacgttttttgtgatactcaggaagctctcatggtcttttggacaaggatacgtgaatgcgagctttccgtttgcttccttgttaatctcggcagcagtcgaagccgcagcggaatcttctgtcggcagcgtcattccgttgatgagctcgtcctccccatctggcccgtcagactcatcgctcgacgaagcctcctcatctccttccatgtcactgtcacccatgtcgaggctggcattcgaatctgtctcgactagatcttcgtcgatgatgaaatcatcttcatcttcgacgccaagttcagggcgtgtttcgctagggtaagctggaaggccgaaatgcgtagcatcgtcaatttccgactcgtcatcatcgggaatttcgtcctgatccatactgtcctcttcgtcgtcagtgagctgctctccacgcattcgtcggaggcgatcgttctcaagtttcttgagccgctcagcctcttcctccaccttctcctcttcggtcttcgtgcgatctgtgggtcttgatcgttgatcgaatgtcatctgtctaaggcgctgatcgtattccttctctggatccttgctattttgcgactcttctagcatagcagcacgctctgggttcatctctgagaaatcctgtctgggtgcctctgccttggtcgccttggctgcaggcttgatgccccgcagagcctcgaaaagatcaggaagttccttatccaatgcttcccgtaggtcttcatcatcatctttggtctgttgccgttccgctttgtagaacttagacttggcaatgacttctttcatgacctcggccttagtctttttgcgccctggctgttcttcgtctccatagtcaatgaagtcctcatgatcctgatccggatccgcatcctggttttcatcaccatcgggaaatcgcttccgtttccgcgacgtttcctcgtcggattccgcgtcatccaagtctccggcctcgaagtcgtcttggttcgctccatcgaacgacaaagattgacccatgtgagtaagctgcatctcatcatcatcatcctcgaggttgaacatggactccttccgcatctttctctggctctctctcgcaaatctctcggcggcccgttcctcgggtgtcatggtgggatcattctcaccgaaccggcgatcgatgagtccaccgatcttgtttcggctgttcatctctttcagaagagtggcgcgtcgctaactaaagttagctttataatcgcaatgctcaaggaaagcagataaacctactctttcttcacctagtgatttagtaacacctgggcgagcgccacctccagcggtcgtgttaccgtctctggttgtgacagcaaacttgctggatttgtttatcgtcttgatctcgaaagggttgaatcgatctcgaatggcttgcaaggcgacctcgcgctggttgcgattcttcgcaccgactccggtctttgcattttgtcgtttttctttcttggacttctgaggaccaagaactccgttttcacggagagaagccttcagctgtttgagctgagaaggcggcattttgtgtgattgggtttgaattcgagagttgggagtttttttccccgtcgtgattcccatcaaaaaaatcaggtacaccgcctccgcggtcttcgtcgatcaatattctgccgattatgttctccgcatctctccaactctcacaaccggtatggctcccttttctggggatggtgtgctatggctatgcctaggtatggcgcatttgtccgaggaagcgattttggctcagacgattaacttacctaggcgtctcattgttctttgccatacgcggtatcgctacagacctccgtcaagtcgttgacctgacagaaatcaaacaaactgagaaggaagacaagattattagcgagggaacagaagaaggtgcgcagatatttatatctaatgcattactgtactaataaatcctatagctctcaagttagacaccctcttgaagctttctcaaagcacgagccatgacctccgagctgcgtacgctaaaacaacgttattttgaactctgtgcgtcagctaatactacacagggcgctgcgcatcatttcagagcgttctaccaagggagatactcgtgatttgctattggaggaactagcgtccaagaacaaagttcaccaacggcgagctctgaatgcattgaacttcttggtttctaaccgggcccgtatgcttcccaatatgcatcattttgacagtatatagatgctcatactatcttccagtcactcgaacctcgatttgcactcgactcgccgacgtacccacctttaccgccattatcaactgcctttgcaacctactagaagaacacgtggagaagacatcaacgaccaattcgcctatttttccaaagacacggccgatgggagaaaagaaggcgctgaacattttgaatgtcttgttgccagagaacatacccgacgcattggaggcggggatcatcagccgatggctctgcagatatccattcccgtgtgcaacagccgagccttctcgccggcgggatgtggtgatcctcatgaaaacatggtggtcggatgatgtagtcatgagcgcgattttcagtgcgctttcctcgcacccggatggaatcaagcagctgcggaaacatggactgatgggcagcatgatcgaggagaatgaccaggacgatgaggatgatgcggacagtgatgtgtggatggtagacgcggatgaggcaggaggatcttttggacgatctcgttcgcgtagacagcaggaggggagtgccgaagagcaagcgcttcgccgacgcaggagagaagctatggttttgagcgacggtggacggccaattggaaatggagacataatccaacgacctgttgattatttatgatcttcaatttgtctgcaacactacgcaaccaaccgactctcaaaactagctttccagctactgtactttatgtccatgataccccacgcaagaaatatgatatgccatgaattttctttgaacctcaatataatactaaagccccatccacgctgatttggctaagtggtcggtcttcttccgactgttcttgataacaccgaacgccttcaattctgatagagcgccatagaacaaagacattacaactcggtcatcgcagccatcagcctcttcggtttcaaagacaccatagaaagcctgccagagatcatgaacattcaccagagcgcccgaatcaaggtacaattgataaagtatcgcggtggcaggttgcttggccgagacctttgtcatagtggcatccgacgaggaaagcaggtaatcaaagggagtagccagggcgcgctcgattgcaaagcgcggcctgggggcgaatgtttcctttaatggattccgcagatcaaacaagaaggcttcatgtagaaacagatcttgtgggttgataagggtttctgtgagatatacttgcaaaagagcaaccagtcggtcgacgatgttggtatattccacagcttgttccgatagatcggcttggcctttgcttagccggatacgctgctggacgacagtggttcttgtgacggtgctgttgatattgtatccactgcgcagtggaccggactccgggcacgtttccaatagagtcttgagatcttcttgaatcgcatcggcttctcgactaattaatatccctctgagacgcacgagaagttcatccagcttatcagaatctagggttttggctgcggccaccatttcttccacaatagtggactcagacagttcgccagagagtgcgcgaacagaaaggtccggcacagtagtctttttcgcgctctgtgtgtgttcaagacagacatatatgacacggactgcctggaacatgcctcgcattctttgctggtttgcatccaggtacttgggcgtctcttgaataagatattcgtcatcctctagcaaatctcggatttgcttgatagagccttcttcgactagatcctcacagaaccttgaatcatattagttgagatataacctgggaattggagaatcttacatccggaatgatggcaggtttctgacggcctcacatagcttgttttgggcgagaaccgtagaatctgggttggctaatagtaccgacagaggatttgcaaagaaatgagacatgtatgcatactgcacgaattagatttctgttttaaagccattgggatagttctcaccttgaccatgcggctgaatgcctccggactttgaaaatagtcacttgtgttttcaaacagagtattggtaacgttgcgacccagccatagattggtgcctgagtcggtctgcagagtctcatagatgcggtcgacacagttcccggcctcttggacctcgaaatgcttcccttgaaggagagcaacgcacgagcgaggcagtctgccttcgaacagctctacagaggtagagatgcctaatagaaccgtgaacggtatacggtcaagccatgatctagtagaaggtcagttgggagatcgaccgaagtctggaatgtcaatcgcacttgaatagagacagaagatcagtcaaaaggccagggtcaaaagcctcgctatctcgaagcgctaggaccaatttcttggtcccctttctctgcacatagtcgtgaagaagatctagatcgtaaccgagaagtcgagggccctggtgaatggttagtacaataatgcgatgtttttgattcgacatacagcacgatctgtaaggaacttttgatatccatcattgccatcggtgtttgtaaccgcagctcggatgatgttcttcaacgttgttttcagattgggagcatcgcctgattccaataccacgacgctgccttcttcggtcgatatcaattgaccattaagccgtgatagcaatctgctaagcgaggaaacatttgatccaactgtcaccaaagctgtaggaatacatccatcacatctaaaaccctagttagagcacgttcgtggatcgcatcgggatagggacgtacgtctgaggtgaggtgtttctgacaaaggacaacacatccgccaaaactgctgaatcgacatcctcgaggatattctaaactcccggtgagcaatatatcactatcggtcttaattaatttgcccgactgacctggatcttgttttcttgctttgaccaaagctcctgatacgtatcatatcgcaattggacggactcggcgttctcgtctccgtttaaaaggggcacaaagcgctgttgatcagcctggtcatctcttccggtagttgacgagactttgcggcgctttgaaggtcgttcgcctgctgattttccgtgtttgggtggttggtagatgtacgaaccctgggatgatttgtgagcgcgcaatcccaagaataccatgccagatccgaaaacaaaccaggttttggggcttgtcatttgacaagcctaaggcatcgttcaatccatcagcatccatactgctgctcgaaagggcttggttgtcgcaatggggatgacttcaagggcggaagcgcgacaaacgctaaacctaattaggcgataattggttctcttccgaacttgaacttcttcacttctccaacttttctggtcgcattcgatgaccgattgacttcagacttcagacttcatgctgcgccaggctattcaaggagcccgatggtgtcagcatgtggcccgcagcccatcgacacgcgctccacgccggaccttctccgccgtagctccgcggcgtcttaattttggcggaccgaacgacaaagtcacattctacgaacaagaatcccccgaaagcaaaacacgtcgaaaaatcgaccccgaagccgaacagaatgaggaacgagatgaggtcaaaaaggagctcgctaagatccaggatgaattgaaggtcttggaggagggaccttttgctcccaacagccctttcatcaagagtttgccagaaaaggaaaggaagattgctctagaagctctgaaaaaatatgacgaggaaaatcccgagccagcagaagaggccgggttggagcaagtttttgacaaagagcttgatgatatgctacgagaggagtttgaaggcctcgcgatggaagaagagaactgggaggatggcgtcaaaaatcggcgaaaaatagctgccagacgatctgccgcagcaaagcgtgcaggagcagaagctcatccttacgttataaagttcaataattctctacgactactccaagaaaagatgtcagacgagcgggctcgacaggacttatggaagtggtaccgacgatgcaagcagaccatcccagggtttttgacaataatgcctgagagggcactcgaaacaatatgggattcacaagcaataggagagtctgaccaggctacacgctcaaaacatttgcaaatcctggccaaggacgctacatctatcggccaagaactggctacgcctcagatcctgttttatattacatctctgcataaaagtggctccaccagccttgcactagagcaatgggaggcatatcaagcggagttgtctcagaagaaggaggatctggaagagtactggaagctcggagtgcgattatttgctgcagataacaacccacaacgagctcaagatattgctttggctttcctggcaaacgaccgaactcgtcagccgcgtgtactcattcctgtcatcacagcatggggaaggctgcccggaaaggaagctgaggtaaaggcttgggcactttatctgcggctgaagacattcctgggctctgatatgaccatggaagactatgatgaaatcagcattgctcttctcacggctggtcgattggatactgctgttgcaatcttcaaggatatgatggtgacaggaaaagacccggccaatgactcaactgctttgtacaaagccgcattgggcctggcgggtaaccttcatgcatcgagcatcaatgaaaatgaagtaaacaaggtctctttgtcggcactcaaggtgttacctcgccagttccaaaaccggttcttctatgcaagttggatgaaaaagctcattggtatgggtgaggtcgactctgctgctctggtgattgaacttatgtatgagcgatgtgtcaagcctgatagcaagcacttgaacggaatcattgccggctggctccgtgatgggaacacgagtgcacgcgacaaggcagagcgacttgggtgggccatgattcagaagcgtatcgatgttgtatggagacgatacctaccagccgagagttccccccggcttcaagtcaagtatgaggagacagaatctgtacgcatgcctcggtttatgcagagagaggtcccacctgcgagcatcgagaccttctctatccttcttcttcattacacacgccgaggcgacgacgacatggtcaaatacttggtcaagtctcttagtgatgcacacatcaagccgaactcttacttcatgaaccaccttctatacgcagagctccgaaagcaagacgtgaaaaaactctggaccaagttccaaacaatgtctaccgccatccggcccgacgtggaaacatatgcctgcctctgggactgtgccaagctccaatacgaccgtggacgtactgctttcgatgcggacttcccatcagcacgccaactctatgccaatatgatgtcctggtactcccaattatctcctcgcactcagaaaaccacccgagcgcagattcctagagctctatttgatcagattgtgcgatgtttctgtctctctaaagacgtccccggcacattagtggtcatacactcgatgcattcagccttcggcttcgcacctgatgacaccaccgcgcgcatgatagtacttcaaattgcgcgactggctggtgtaccagctgacactcccaaacggcgcctccgccgcttgtcttcgacgccacgaagcaaagaaaatatcagccaggttagccgtttgctcgaactgttgggtaaccgcaaagccgaaaacctgcgattgcaaggattgagtcttgagcagctagatccacgtgagatggaacaataccaactagagatcatggcaagtctactacggatcgtgatgagccgagcagatgccttggacccagttcaagtcgaaaataaactcgagatagcggcgaaggagatgttggccgaacatatcgatctggggctgcccttaggggtagaggatagcaagcttttgtgacaatgtcagtagcctatcctttttggcttatccattgcattggatttactgagaaatcaaggcgtttgacggtttgttttgctcttagattagggctgtatattattttgtacttagacataatgtacttatatcgctgaggtctaccatctttcctctgctcctctccacaaatgattttccttttccttctctctctttcttgctagctcagctcacttgatggagtttttgccttttcgccttctctagaaactttttaacactcggcaattgtcgcaccaactgtcctaccaaagtcttgaaattgactctgatatatctcctgcttgctattgattatctccatgcagaagctggtattatccacgccggtatgatatttctagacccattttcacttcttattcgtcctcctaacgcgttccctctagacatacaagaaaaaaacattatgctcgggattgaagatccttcaatcttagctgatttcgaagaggcggagaaatccaatcctagtccccgggagatcattgaagatcgagtgatttatttatctcacaagctcaagaaaacaaaccagcatgaccgacctgttttatgcgactttagccaggctcctttggatcagcccgttactcaggtgatataaaaccatatatataccaggcccccgaagttttactacgaatgtcttgggatcaaagggttgatatttggaatatcggggttgtagtaaggagggcatattttggtgtacttaccaatcctctaactgtcaacaatctaattacctcaggtctaggacttttccaaaaaggacatctattttacgctcgagattcacagaagcaagattcggacgctaatcatatcgctgagatgattgcgcttcttggaccaccgccaagagagatgatacagaacagtgactatgctacagacttctttgatattgaaggtacgtcactagaataatacaggcctctagggctcccggtcctgactgaagatcaaggcagttggaagggcaccgttccaatttcccttaagaactttggagcaccttgagggaaatctagaaggtgaacagcagcaactctttcttaaattcatgcgcaagatgcttcggtggcgactagaggaaagatgttccgcaagagatttattgtcagatcagtggctaaggtcgctataattagtcttaatagccccgttcgttgtatatttgaccggaacaggagtactttgataggttttctaagtcttcagcctcaccaataactggtatactaaaaatgtaatttctcttgtgaaaccgtagtccaaaaacctctaacaagagtgtattttgaaccaaaaagtacaataacaggaaaaacgactcatatctattttttgcccttgcccttcttcttctttgcgcttgccggagaagcaggcgtactcgaggtttccgcctccacaagaacagcatcgtcatcactgccctgaatagaggcaccggcggcaggggccgtagatgcggcctcagaggacttggttgtgatgttggtagtcttagcctcgtcagtagatgctactgagccctcattcaactccttcatgaatccctcttggatactcgtcttcttcttgatccaccactggcgctcctcttccaattttttctgttgatcgtccatgcgcttgcggtaaatatcgttattcatcatttcgttggcggactggaagatagtctggccccagccggggacataggcgtttgcctgtttgattttgtttagtaaagcacaaaacatatacaaccatttgttcgccgagaagaaaaaatgtttcttggcgacagagaacggagtttgcttatcatacctctgaaaccacatccttgacctcatcttccatctccttctccgcgcgctggaatcgctgccagagatcatcgccgacactaccacgttggacgagcgttgtgagagcttgcttctgggtgcgcagtgccataatgcgacggatgtcttcagctgcgcgacggagaagagaagccttgaagatagagtcagggatagcgggggccttcttctcttttgtggaagttgttgagggttcaaggtggaggagagagaagtagatatcacgctggaggtgggcagggaaccatggctctagagatgctgccttgtctataaattattcacaaatcatatattagccttggggacaattggacacgtcggcgcacgagatggtcggagaggctgagaggttgaggctttctaggggtatttcacatacgggacttgcgcttgcggtagagggaggagaatgtggcaagcgatcccaagagaatgcctaggtaggcgactgggacggcgagactgagccagtccacgtcgaacattgcgacgatgtggtttttcgggcaggggtatatggagagatcggaggtccgggaaagaaaatgaaataaagatggtcaagctgtcattcccaagtgtgaaggtgaaatcaagaaaagaaagggccttgaagtgcaaatgtggtggtcaacaagctcgaaaggccagggtgtttagtgggtcacgtcacatgttcactccttcgaacctacttccatgatagttataactagttcgggctgattatagatgtagatgtacaacttactacatatgtggctagagtggttcaggctgcgtttttttactatagcgatactataataaatgacactcataacgaaagattcgtgccaggagagacttgtgatattaaattctatgtaggcttccgcaaagcccaactttgggcctggatgccgggcctaaagtctaacccccggcctatcgtaggcctattaggcccccattaggcccctacgaaagcctattcttatcttaaatgttatacttgtgtagtatctataaagtctgggaacaatgccacccggtcatactttcaaatgaactagaaagaggtcagaaacagtttaaaaaaaaacatgaagagggcgtttcgtgggctgggcgcaaaaagagtatagatatactagttatgttacaagcacggagttacataatacaccccagtaatgatatttgaactccaattccatacaaatagacgaaatagtagacagacatcacggaactggtgtgggagcgattctgacctcaacggcgccgtcatctggcagaagtaggtcgtcccctgccgctggttccctccggtcaacataccgaagaccattccatccactcttgctatccaagcaccatagtctccggcttctgcgaaatgttgtgggttcctaactcgggacattccgagccaattgatgacaaaatggtacccatgtccctgtttacttttgagccgatcaagctcgacagattccaagctgtaaagcacagaagatgttagaccagtagatcgcccggacttggaaagtcccaacccgtcgtgggtatcgaggattaaaccactatgatatggacgatcgatcatgtcgctgctattgttattgctgtaccggaacccctaaagctcatgaattagcctgagaaaagacatagataacatcgaacttgatatgttgccagagacctcatcagcatgcatttttcggtggattctattgctcgacatttcaatcagagcccagtcagcggccactcgacgcttgtcctcattgagtcggatgcgatacataccacttccggcgacgacatgtcctaggtagtatgctccattctggcattttcgcatatgaatcccggttcttttcaaggtgttaaatatcccgcagcgtagcctcgtacgcacgcctggcagaatccggtaaccagcaaccttcccctttgtccatctcggccttcgaggtatagaaagaagcatctttcacatcttcaatggacgaatttagcgcttttatcatggtcctgagatctcgagatgctgggtggtcgattcggagaatgcgcttggcgatatcaaggaaaaaattgttgttgtgcataccagtccaagccaacccaaaggcctccagcgcggagtgttgactttagaacccccattttatcgatgataacgggaccattgaacggtgaaaaggtggatgattttgagcagaagtccattgaatgagcgcttacttgcgagaaggaagatatggttgcaactgacgacatgatgaaaatgaccacgatatcagtcgagggaggagggttgggaagcggaaggttccgatccgaaattagcataaataaagtataactagttcgaggagcggtcttatctataacgatctaagtgtcctaccgtatctgtactttctacttataaagagaatcaccatttatatggtttacagaaagtcctcgtactagacgagtagaacccgtaggtagtttttcttttcctttctcctgggtatttattatctaatgactgctctaaaaactgttctaaaaatggtatagatactaaagagcgattccttctataactagaaagtacggacagagtaggtacgatagaggtataaatacctcctagattgtgaggtactagaagaaagagtacatttaactaataacaaagataaagaaaaaaagaagaagtaagttgcaaagtgggaagcagctactagttaatatagctgactactttataaacgttgcaaactttgtatcgttgtctgaagtacaacatttacaacagtgtacctattattccttcaaatatatatctcgttgtactccggaatatgaagtagggatttgggatatatcaaatcaaggctagctatgcaaagcgccccccccttccctattactggcttattggctcacttctagcctacaacacaacaagttggatgatttcactcaagtggtagaaagttaccgcttggagatcttttctgtggaaaaacgtgctccgtagtttccgcctgtaacgctgttggcgccattgatcccaagtccaacggcgtttggaaagccaacaatggatttcaacacttgtcaccgcattctttcctacgcatttgagtccataagaaaacaaccggcacgtggcatgtacacgaggttatgcttcgcttcgctccggccattctcaatacgacctataagagctacaattacgaagagaaaccacgttttgaaccattattttcatagtctacatgtttcccatgtgaaataacacgctgaaactaatttttgcgtaaacaatgagagagattgggcaattcacacatttgctccccatccaccacaaaggaaaaaaaaaaaaaaagaaaaaccatcgccagatcagaggggaatatgaaccgagtcaacatattgacaaagtaagaaaaaggacaaaaaagaaaagggtgaaagtatggagtctctatcagacatcactaaaactcaggttggccaagatatccttggtctgttggctgataggtccgatctcctgcatcgcctgcatgtcttccaggactgtattgtatgttttgccgagaccatcggcgacgcgagtacggttccattctccacgcatatgccacacatagtccattagattggtgttgatttgctccagctgctccactgagaatccgctagttgacagggttagctgcgtgtgcagacgctcaacaacttcaagatcaagaacgaatggttcatggggttcttcgttcaggatcaattgcaagctagccgaagcattggttgctggcatgttggatgcatcgaacagcgggggttgcggtttcgactgcgactggcttccattcaacccgctattctcttgggtatctgcattgctaagcagcgagtcccgggggtggggagaaggctggctgctgtcattttgctgggtgtcgggcagatggtcttcctgtgacacgcgatcggggtatggagtaagatcggggtattcggttcttgagacatgagggctctgagtgtggtagttttgattcgacagatgctcagaggatttcttatcagaagtcgtctgggtggtggatgcttcattagtgtaatcagctggctgggatccgggggccattggagtcatggggcctcgctgagagaagctggaaagaccagattctcgacggatctgctgagaaggcgcagtgtgggaataagggggcttgggctgtgctgatggcccaaacgagcttccctgggtatccttgctacccgagtggtcatcagaattggacatgaaaatgtcgccgtctccatctccatgggtaccattgctcgcgccgacagcatgggaaccaaactcgttgagatccgaaccatcgccgtgatgacttccatttgcgaaactcttggacgggggtgcgggcgtaacagggcgcgaagtcgctttcccaacatcctcattgtccccgacgggttgaattgggccagtcgataggctggattcagtcgtgccgtgcgacacaataataggctcaggaatggggggaggggcattctccatctgagcacgtttgccacgctccgcggcctccttttcacgagccatctcacgcaggtagacctgctcacattctgccataagagctggttcggctaccataacactagcgatatcaacttcgacattagtcaaaagttcacttgaccgcaagatgcgttccgggtcaccagtctgtcgagcatctttgaccattcgcttgatatccgccacaaagtcgacggcgcgtttgtagtatccgtttgcaaggcgtttttcaattgtcacaatctctaggttgtagtagaacttcccagtggcagtttcacggagacccaacacaccatgcttgtcatatgccttctcataaggccgaaaggtatcttgctgatccggtggaagatcactggtaacaatgttgggattttcttcctcccacaagtatcggatttgggattcatcgatcacgcccgacctaaaacgcttgtacctcttgacttgatccataataggctgaattcgagttttcagaagattcaaggatatgtaatctttcttcctctgagccttgatctcctccttggtgagttctgcctcgggcttgggaggcggaggtggcgcgatttccaatttctccagctgacgaagtttgcggttttctggattcgggaagcccttcggaggtgtcttgacgaattcaatgatttttccaaagaattcacgacgcgcatcatgagttggagcagatagatcatacaggttcttctttgaaaacccgaacatgctctttattagactatcatccacttcctcttcttgtgattcaagaatgccaagcaaaagaactgggtcagaaggcggcaccgaccgcaaaagactcatgaaagtagaaatcacagtaggtccgacagtctggaaccacagttgaatattgggaatgtaaatcacactcggcttgtgtcgcttgacctccgtgaatagctggatgacagctgcctcgggagagcgggttgagtcactcagcaaggttgggagatcgaaggcctgtacatgcaggccctcaaacacatgcagcagcgcggcggcgaggtattgctggcccattccgtgagggcctcgaaggaggagtcggggtcggaagacacgcgagcgatcaaactcctgaagaaggagctcgcgggtgaagcctgcaccatcatcaggctcctcatattgagcctcctcgagagcagtaagcttctttcgctgtggaagtatctcggagagcaaagacttgatttcaaataatggacgacgaagcaggggttcaatgcttggggggagggcactcgcaccagatgaggtagaccgctctgaagagggcaccatcttcttgattgctagcatgaaatctttgggggcgacatcgattgttttcggatcaatcacgagctttttgtctgatttgtagatttgagggtatcttctttgtacagcattgattgcagcctcagtgcaaagggctcgtaagtcagccccgccataacccttggtcatatccgccagatcatctttgatattgcttggaaggggaggatcccattccttggtgtgaatgtcgagaatagcacggcgtgcttcgagattaggcagcgaaaaataaaattcacggtcaaaacgaccagggcggcgaagagcaggatcaacagagtcaggtcgattggtggcaccgatgacaaccacctgaccacgaccatccatgccatccatcaatgcaagtaaggtcgagacaatcgaggcatggatttgttcttgtttgctcgatctcacgggagccaaacctaatatagaatattagctattgtcaactatgctcagaatggcctctcttaccgtcaatctcatcaaagaagatgatactaggctggttcttgcgagcttcttcgaaaagaagccgaagttgtcgctcggcctcaccgacccatttgcttaatgcatccgcaccctttctcatgtaaaaagttaccttgcgtccttctgagctgacactgttggctagagcccgagccatgagcgtctttccggtaccaggaggaccgtggaatagaacaccgcgaggaggggtaattttgaaacgctggaatatttccgggtacagcagcggcaaagaaaccatttctttcaactggtcaatgtgcccttgcaaaccacccacatggtcaaagttgacattcatgtcaacccccaggggatccgcgtcagctaaagcttgcttgttattgaacttgccaaggtttgcaggcgtgccggatgaggtctgagcaggatcagccgactggttgtgggtggctgcaactccaacaccaggagcacgattcggctgtggggcaccttcgtcatcactgctatcgctgtctgcgcctccaactgcagtagggccaccaggaacaccgagaatcgctgaattaccaccgccaccgaatgggcctaatgtggagaacaaagtacgctgccagcctccacctccacgaccacgccgggatggagaccctgtcacttcatggtcagtgtcttcattaggttgaaacatttcaggtcgaatgatgcgataatcaacgtcctttcggttgcgacgcggtttctcatacacgaccgcttgcttcgcacggcgacgggcacggccagtaaggtcttccaattcttcggcgagttcctctgcctcctctgagggcgcacgggttcgagaaggccgttggcgtaggccaggacgccgactggcagagctatcctccgcttcctcgcgagcttgaatttctttacgaggagaggcacgcgattcagggtccgagtcttcctcttcatcattggatggctcctcctctggctcgaaatcactttcttcatttttgcttttccgctgtgagcttcgagacggctgcttacggctggaccgacgtaggtgcgattcttcatttgtcgccgcgccttgcgcggtattctcctcaagagattgctcgtggtggagcctgcctcgttgccgagttgttggaggttcatcagtctgctcggaatgatcattcttcgaatcgccattttctgattcaggaacaacatcttcatccggcattactttctcaattgggtcgtgatctccatcattcagtggcaatgtatcaccttcagcgccgccttgaggcacgtcactttccagtacctccatttgtgagccctgaatagttgtttcattgatgatttcctcagtgtcctcatcaccttcagcatcctcatctccttcggcgtcttcatcttcatcgtcttcatcaatgatcgtgcgcttggccatgcggccaactctggaaacacggcgagttggggatgggttttcggcttctggagtatgtgtacctcgctcaacagtgtgcatatgacgaccagagttggtaagggcgtagatatcctctgaggcgtcacgagtacggcgggttacacgtttagtgaaggccaagtaattgggcgggagtttcaacttgatgacggtgctcttgcgtggaggagaaggagtaggagctcgtgtctcactctcgccgtcatcattgagcaggtcttctcccgaatcaggttcctcatagcgcgggcgacggctctgggtggttcgtcgacgggccgttcctctgacattgcgttcgacttcttcctccgattcttcttccacctcgtcgaagtcaaaatcctcggacagttcttcctcgtccgaggtgagaccgtcgtctgagtcgcgccgtctcttttttgtggccggccgcgactttttcttggggctggccttcgacttccggccggtcgaacggggataacgagcatgatcactgtagtcctcgtcatcggagtcggactttatggcgacctcgtccagggtacgctttgcgccacgagccatggcgtagttttggtgattaggggatcactttgaaacacaacgtcagcatgcaacgctccaatttgggaagtacgatgaaaacacagtcaagagggtcaaatgcctagctgacaaggaagacgcaaagatgaaaaggcggatcgtcgacgttgcgcgatgcgggcagagggacaacacttacgaatggttcagttgtcgccagcaacagccagaccactcgatcaaagggaaagaatattcctgtcacagcagtaaccgtggcactttcttcccgacaattgctgatcaatatgttagcggagacggcacggtggtggagcgcaattggggcagagatggaagggtctcacggactcgggaacgcgtgggaaaacaaacgtgtcggaaagctgtcagccaccaggacaaatgcgcagtacacagaaataattgcagcaagtagaagaaagtagaagacgatgcgagatcgagggacgaagacttcagggaagaagggcggaaaggactcgcgctcattggggctgactgcctgaattcatcagccacttatcgtggcgcaccgattagtcaacaaagtgcacgtgccaccctctctcaatggggggaattgcttcaatagccattgtcacccttcagccgatgaatcaagcccccatgaatcgagctattgtagagctccattctcctcctgaatggactaaatggattctattaaccattttgatgccccaatacggcacattcaggattgatgaaggtgtgggggaatgacatgatacaatgatggcaggaggtgtcagagggcaatttggaacatgaaggagacgagaatagggccctttgttttttccttttcgttgtctttttctctgcgacgctttcgaccggacctgatatcatgtgccgctgactcagcagtggctcgtgcccctgcactagaagatcgacgtgcatcgacactcatcgacccattcaccaagccaattgagaatctattagtttctttctcgtgatatttgtttttcattgatatacctattgatgttattcatgtcgcactacagcgccgataaaagccctggagacttcaatatctaatcttaacaagtgacgagaccacttacattgccatcgcgacatcacagggaaatctttttatctggagggatagtaatttctaggatagcaatggatttagttgaccatgtgtgtatatctcaacagttgaatctccaaataagcaatagtgtcaaaagcatcacttcacgagtagccatctacttccttccgataatttccttccatttagccagctttgacgccaagtcgacctcctcaatcctctcctagactttccggtcccttataatgtaagcacgcgacattgagagaagataagcactatttgaatacttgagggccgctctcagagcatctctgatattcttcttctcttgtgcagtgagctcacatcctcggaagctcgagcagcatgcacacccagtagtgcagtgaccggctcccatacttttttcaggagtagactcgcgtttctcgcagcatccgcattcacgcccgcagcaaccacctctcccagcacaatccttgatcagttcattttgcatataccatttcggattctttcttaatgattcataggcaagtttcatagggccaccgggaatgctgctttgccacttgtgaagctcacactcctgataccagtattccttctggagcacctcttgcgttttatccagtttctcgagctgtacttcgtcttcaccggtacttttgcagtttttggagtgcccgaaccttttcttgcagcgcttccttctgctgagcaagttcacggacatggtaatcagcaatgatgagctgtacgaagagatcgagcccacaacgagcttttttatagccttttctatacagaaatttgtactctgtccatccaattcgtttgcgttcaatccgccaagtctctgttctgaagaccatattggaggacacaatttggagataaattagatatgaagggagttagctttcaaggcaaagggttaactctacattacatcattaggtagtcgagcgccgacacccaaaaagtcacctctatgtgatagtcgacaaatgctagaaaaaactgaactttgatagagaaaattggtcatgaatacatatactggaagagtcacccctgggtaatcaaagtactagccatttcaaccccatatatagcaaatccacgctagttaaatatatgtgctgcagtacttaccttttctgtcgattatttttggattgtatacccaacttaatcacgagaggaagagagacgaataaattgacacctgaggaagcaacgccaagaccgatatacccgaaataggatgcgaacttcaacatcaccctagctcgtcttctcggatatcaacaacgagaaagaaggcaacggcttattaagatcacaacatgttttcgcaaccagctcgtcggttggcaccggctgtgatgtctttccaatccgctcgagctcccatgagccgacgcaccttcacctccacacaagccacattcaactcatctcagaaaccaagtgcatacaaggaaggggtgtgtacatatttttcttccagaccgcagtatttaattgcaatcttctaactttgtgtgtctagatgaataaatatcgagcctttgctggtcccttcgccaagatcttcttggggggcgtgttcgtctaccaggtcctttattggacttggttaaaattggaaatggatgagattaaggtggcaaaaaatggtgagaacagcacaaattaatacattccattaccctatcttgcatgtcgctaacccttcctgcagaaaaagtggcggtgctagagaaagaagcccgggagatcactagcacccagaaatgaacacaatcttgagaagaatctcgagaaaacctgtaccatattatgcttcattgatgcctagcactatattatattgtggctgtgaataatgtcatggcacttccagacttggagatacattgtgatgatcccgatcaactaaacattgcagaatatccttattatattacggaaccaggattccaataactattcaaaaaccctagtatgtcatgccgcagcatatttgcgcttccgctcgcccgtcgttgtagcttttagactgtgatcaagcgtctgtaccacagcatccttggtctgatccatctcgtttccctcgagggacgaagacgggaaccgccagtcctggcccctctctcctttcttgaaatgctcaatatcaatatgattaaacctctcatccaaggcctcggggccatgggtctttagtgtgactctgtggttacagaatccacaccaaaaatctgactggccggccagatcgagccggtgattgccagcccaagctgcgacgtgatattcatgaattccatgctggcgcaggtggtgggtatatgtgtcgggtcgatagaacagccgctcgcacgaggcgcctgtttgcacatcggtttccgtgcagaaccaactgggcacaccgagatgctgggagctctcgtggcgcttccagtcggccttgctgccgaatgacttggcacagtgggggaatgtacagctgtagggtcgatcgtggcgcttctggtgctttctaatgatacccgtggttaatacactaataagaataagggtcaagggtgacttacttcatttcacagcgaagccgggtctgctttgggcacgcgtcacattggaaccacccacgtttttcgctatcaggaccttgggcggtggcttcgttttcgtcagataaccgttccaatgccaccgaaagcaacttctgtagcatttgccgctggggttgggagagctgagcagcgtcggtctcaagatcgattccctcatccatattctgacttgatctccgcccgcggctgtttatcatctttgtcatggcgttgattaagttatcagcggcgtctgcaaccgatccatcaggccttgcgatggcacgttcagtggacggatcttgactcgtttttgacagacccatggaaccaaaagcaggcgattgagaaggagtcgagtctgcgagagacggcgtaccatactgagggggtcttggtgtggcagcaccaaatgtgaagatatcagtcctttgttgagacatggaatcatattccggctcgagatcggttgactggacagacgcctcatcttcttccgcttctaataccgactcgtcccttgagctacgctcgtcgaagttctgttctggttggtggaggatgactgtctcgtaccaatccatggacctgttcattaattagtgcatggaacattagatgtctcacttgaaacccgctttttaaggagtgcctccccatcctcttctcgatgcattcggttcaagtgttgcttgaagttatccagacgcggccacctcttgttcgggcgcgggcagtttgtcccaaaacacatgtacatcatcttgggcccacgctcgggctccttattgtgaacgcattttttatgacgggccagatcattaatggtgccgaagccgtccttccgcgggcaatttggaacgtcacatttgaagagtttcttgtggcgagcctcgtgtttcctgtggaagttagtcccctgccatcactattctcaaatcgcggctagaacgatataccttttgtccgaaggacatttcccaacccacttgcacgatggatgatcgcatcgcatcgaggtatccaccaactgcgacggcgagcccataaactccgatgtgtacgatgacccagacacagatccatacttggaatgaccaaacaaaggccccgactccgtaggcatattctctgtcatctcgacgtgcgggctcgagtccacgctgtacgaagaagcaacaacagattgcgttgcacagctggtcccaccgtacccggaatcagcggaatgatagctatctatatactggctcccgttctcagatggctcgctatagtgatgttgcgagaggcagcagtcctggtcgggcatctgaacagacatgttcaagtgcgagatggatgaggcagccgggacaccggtggccagtagcggattccaggcatcttggtcgcctatcagacgggagtgagcgtactgggagtagtataggtcactggggtgtgaaggccactggcttaagagtgggtggttaactgttggatcgagcgatccgagttggaggtctagtagtgggtttgcggcatcgaaggggatattcgagggtctaaaatcggacagatcatgtccttcgtgtccaaccatgatgccttgaaggatgtctgtggagtcattccagtccagctgtgtctgttagggtggagttagattatgattcgtgtggagagtcgtatagagttaacagggcacgaacctccatgactatctaataatgtctttaatataaagaagatgataaatttcgtgaagtcgagagagaataagcacccagtcaaatgggaggggcacagtattaaaaggctcgcgatgcatgcaaatgccaaaaccctacacgcgagagacacgcaagctccacacgacccgagccggttgacttcaccacgcgatagccgattcaagggttggaatgtgttaagcgaacatgattaggaatatgctcaataaaatatacacaaaaaaggaagaaaaagaagaaaaaagcaaaacagaaacccgggaggtaaaagctaagacaaagttcaccctcgcgtgttgccagcgtggaatgcaacatgtcatcccttgattacacagcccgcccctttacccgggtaaatattaatttgtaggttattccataaactgtggtgatattttccacatcaaaaatatgaggctgatagttaaaatccaataccggactaagatcacctcaaccctggtctcccgaggttgtccggttcacgatcggctgccgaacactctcacctcccagggttgattcagcccgcttctaacataatcgcagaacatccatagtttacacgtatcacacacccacgcacacagaaaatgtcgttagtccccctgcacgaggcatgcaagacaactccagccccccatgaagatctcacgataagtctccaaaggggaggaggctgctgtagggaagcaaggaccggattgggctgtgacaggacagacgatcaacaaggctgatcgacgccgatgctcgcttgccatgttcgtgcaagggataaataagataaatgcgcacgtttatacgcgatacatgtgtattttcgcatccaggagtcaaggagattaactctgaaacgagaattggagcactatctgaatttagcctgatctttactccgtgctccgtgctcggtactaaatctcggattaccattgatgatctccagaggtactttatgttcttatgaaccatggaaccatgccccaagtgggaacagcctagtacaaaagaggaaaagccaaaacataaatctgatctctcatatgccatgcgctgtttggtctgaaacgaaattcctgagcgcccgaaatatgtacagagatattgcgagcacgtgttaaaggaaagaaagcatgttagttaaatcatcatacatagtcatcattccagaaatacatgagatcgggaccagctctcccgatgctcgggaaaaaggcacaaaaattccttctagtaatcactaacacggtgaagatgacgtagaacaattgacagcaaaacggagagggggaataagaatacaaaaagaagggggcattgtatctataatcacattcgagagggacatcccgaagagtacgtcgcaggactgtaggggctgttggactccatgggttggtaagttgagtaagtaccatcggtggggtacatagagggataagggagatactgggttagaggatacgagtgctgcggcatgagatccgcccccggagatctcgatctcgggacggcgttataaggcggtgggtacgtcactgagttctgatgtaggggataggcctgggcctgagcgggacggagtgtggtttggtcaaattggcccgtcgtgtgcgtgtagcctgggaactgatcaggggtatgagagtctatcatggactccggctccatggaaagttcgcccccggagatggtgggataatttgccagaggtacggcgttgattgaaaacccaggattagccggtgtgctagtgtttcggatcgcgtactgcggctgcagataggtggaggctgtttcgggtagttcgtgtccagggtgatatggcgcggccgatgattcccgaatctgccccactttgctggggttggtggcaagggttgaagcgttgctcggcttcgctaatcgcaaaacgggcaaggcgagttgctccaggtgtttgccaaggtggactgacaactttctccactcgctacacacattcccgcagaagcggcatggctcttcctgcggggcttgcgtggtttcatgccgacacttttcgaccatttgccataatcggtcaagctcctgctcttttcgactatttggcacactctcggcatccacggtgctagaggctttctccgtccttttgatcctgggctctggcattttgtgttcccggaccaaatgctgaacgaaattgtccttacggtaacatttgtggttgcactcaggcaatacacatgtccaccattccaggtgccggtgcttctcgttctcatggcgaacccagtctgctttacgcttgaatgccttgggctcggtacagtgggggaatgtgcaaataaatggctgcacatcttcgtgaacgtgtttagaccagtcggatggtttttggaaggttttcacttcgaagcaaatggggcactcaaaccgggcaggaagacgactgactggtggaaggggcacgccaggagggaaatgtgtcgcagccgccgtcccatcacctggagaatactgttgctcgtactcataactgaaatttgtcacttgggactggatctgtcctgcctccggatcgttgggggcctcgagatcctgcaacaaagtgggtttccctgcctgaatagtacaaagggtgcctgatttgcacgtgtggttggcagctgcaatggaatgcttctgctgcaaatcaaccaagatcttgtatcggcggacttgctcatgtgctaagcggtgaatcaaagccggctcaagccttggattcaactgcatgatctgcgatttgaacccttcgattgtcggcactgggagactttggacagcgggaaaatccatagctacgcctttgttattgctggcgtgtgtatcattctcatcagcacctccattttcagggcccagaaatgtacttttaggtatttggtaggcgtccgaactgacatggggtgatgtgatgcttggaactggtggtccaccatgagctgtcatgagatttattagcccagggctacttggtcgggggacctcgctcctgcttcgacctcgacccttgaattggatatttaaagaacctctctccgtattcggtgagggtgcaggcgacactgcttgcccgacagcggccatttggctggtcattgaaagaagtgcgttgctcaaacttggcgctcgcgaatgacgacggtgcaagaacccattccgtggtgaataactcgtttttgccggcaagtcctctgtatcacgctgcggaaccccggggtagctattcgattgaccgatagaaagttcagatgcttggcgcttcagaatcgatgatgcctgcagaaattgacgcttcaacagactggtgcgtttcttgggtagttcggtaatggaaaagttttcgagagatgcaccaacattgataatgctattgttatcaattgttgcttcgagcgatgcagtttcgaggtcccgcacacgtctgttaaaagctatcatagcgtctgtggagctatctggctgcatcgcttgtaatctgggtgtcaaatcgcgagggggatcgtgccaggggtaaatatgaatgctttcgtcatctttagtcggcgagaaagatgaatagacctcgggggtgctgcgatcatatctaccagattcatcaacctcggctgagggctcctcggagtagatgtcaacgcttgcttcatcttcgctgaggtcgtcgctgctttcatgaactaataccccgggcccaggaaatgatgtgtcttcggtgcgacatttgaggttgaaataatcttcttgtttcaacggatgatcaccggtactcctcgctcgaagtctcctggaaacaaggtgtgggcgtggacgcggtgaactaggtgagtccccaccggcgtcgctgttggctgcgctcacagagacagaccaatgagaaatatccacatttttctcgctcctttctcgctgaatatagacgtcattgggacttggcacgaattcatccccacgggacgttgggtcaatgccagctagatgcgttgatgggtttagaatccatccgccattctcagatcgcttcacgggaacagaaaataccgagtgacgatcgctatcatcttcgtcttctaggtcgcttgaattagcagatagatgtgcaaaggactggctgagatgtctttggggtgatgtgctgcgttcctcgggcgaatcccctcgggtgaaggttgtaatcttaacgatggggcttcttcccctggttgcacccgaagcctgctcagtggtcaactcattggtcaagacaccgagtctcggcggctcagcacctgcgttaaagacaccgaggccagactggcacgaggtggggattgattgccgtgccctagaattgccaggaggctctggacccgccagcgtgggtgatggattcggattctggttgtggtccaatcccgtccactgaaagctcggcgccatggaagaaccccataccgcatcgacaggcatattttcctccccaatcctgtacgatggcaggttttcattttgccatatcgaaccactagccagttcgatatccttcggttccacgaatacacttgtatcagaaataggggaggtgcaagtgcttgggtccgtataatcatttgctctcgggtccaaatagccctgggttgtggagtcgatcggagtttcctcatgagggggtcccgcacggtatccaggactcccccgcgttggcgttagtcgaatggcactggcctgaaagaagatttcctcgggatcagatggggctgataggtaaggatccggagcatatcgatcttgggttgcatctgctggcgattgcccctgggcgctgagtggggaggcgtgcgacatattgaaatgaaatggcggtcaattagccaaagattgaccgcgagaacgggcatcaaattaagccgaattagaaagcatcgagtagatatcgtcgtatagattataaaagcagatttgcgattatattggagttgtgtgtggtgtttggtgtttggtgtgatgatctggcgttctggtgtggtttgacgcccccaatatataagggaatgaagggacagacgaggccgcaaatagttcaggttgaagttgaagttgaaaatcagagattaaagagtaaatgaaagaggaagataaaaaaagaaaaagcagaagctatgggggccgaagattagtcggagatgaggggaacagctgaacaagcgccgggcgcatccctccacttctgattcaatacaagactaagaagaataacaccaataagatcaactatcaaatgtcgacctggtaatgccggactgtcagccttgttcaaagaagaaacaggaatcaaaatgctccgctttttcacggagcctcactagggaacgaccctgtggctgtgcaagttgcattctctctttacatcattacctatggagtagtattatatgaagcattatatgaactatcgatattgggtacttcgtatgcttgtatataggcgcctcagccacagcattatcctgctctggccgtgtccatagggctaaatttattggaacacacggctgaatacaatgaaccttttaccgttggtcagaaattgctcaagatgaaaccggtttatgcagtattcacattcccaggttctatctatatatctgaccaatgtcaatagtaatgatggtcccttctctacgcgcccactaatgtaattatagactacagcgcttatgagatttccataacaaacctgtcaagatagaatttgaatcctacctagttgcaagcaaacccgcaaggatcttcaatcttcatattcctgctaagatttcgctgaatttgtagggttgatgccttgatatgcaggctatatgcggtgaagaggtagtccggctaactttggcagaataacccaaccggcagaataagtaaactagaaaattgatgtaactacagtgtagtgatggaatgatagagggagagagttgtctattcctaaaggggcagaatgcccaactatctagttgtgggggttggtgcctgccgcaccgagctgatggtcaggtgaccacgatgtccaacaagaatgaaccatcattatcttccccagagcttctacagtcacactttacatagcattaaaagttagaatcagtcgttttgctctaaaacggctatcgggcggccgcagaccatccagatccctcgtaggtatactgttgtaaatgttgtactccagacaatgatgaaaggtttgcaacgtttgtaaagtagtcagctatatcaactagcagctgcttcatactttacaatttgcttcttccttttttcttaatcttcgatattggttgaatatattatttcttctggcacctcacaatctaggaggtatatatacctctattgtacctaccctatccgtactttctagttatagaaggaatcgctctttattatctataccgtttttggaataatttttggaacaatttttgagtagttattagagcagttattagataataagtaccggggagaaaggaaaaggaaaactacttacgggttctgctcgcctgctataaggactttctgtaaaccatataaatggtgattccctttataagtagcaagtgcagatgcggtaggacactcagatcgttatatataagaccgctgctcgaactggttatactttattcatgttaatttcggatcggaaccttccgcttcctaaccctatttctatctagcttgccctcgactgatatcgtggtcattttcatcatattgtcagttgcaaccatatcttccttctcgcaagtgagcgctcattcaatgggctcctgctcaacatcatccaccttttctccgttcgatggtcctattatcatcgataaaatggggatggcaatatcactagaggaattctgaatcctccttctatagcgatttgcctctctccatttgatgcacctcagaccccacaattcgctgtccacgcggttgagtacctctccaccgacctacaccttcatcaagtacttctcctacgacccacctttcaacctgtttcccacaaccagcttggcggagcctaagctcttgtagctcgtcctaattattaccggcaaatctaatttcgcctcgtggttcacatcattacactcccgacaacgtcctttgcgacgccaatttgactgccaaatccggcaacgctcccactgagccaaggcatttttgtatctagaatatgaggaaccgtgggattgatgccgaaatgaccgctactgagaccgaaaacggttgcctttccacttgtatgtttagacgtccagccgcttcctaaccgcccactgccctacaataccactattctgcatcctaaaggggctttatgagaaggaccagtcagttatagacacattctttattcagcgacacacactccccgctagctacttcgggtatagtatccacctccggctgtccaggtttgatgcgttattcgcttttaatctacgtaacaacgatctccttttgattttaaaggcatcattttcgggactaatcgtgccaagctattgacaatcgtgccaaggtgtcagcaacttggcattcgaagtctaagacatccgttgtatgttgtagtccatactccgtaccgttgacgccaagatcattcccgagataagataggcgttcgataacgagcctaagccctagagggttgtaagatccggggtcaacacgagaacaagacgtaattggatggctgaaattctatggaacacatgctctcggatccttatcttagcttagatcgaatcaagtccccttcttatcatgaataattcatccgacagtcacagattcccatgaactataggcgactactatagattcaaagctccccgttgaaacaatagtcttggctgctgtcatagaatagataagatgcccgaaaatctttgttttagctattatgagctatgtagatgtccactctgctagagaatatatatgtactgtggacccccgagcagaggagttaggattgcgatcccattctagttctcatcatggccgactctgtaagtctagtatgatggaaatgacacttgcacacagctgacacagtcatataatatagccagtctacaatgcatctaccccaacaggcggagatccactcaaggtcgatgtaaatgctcaatatgcaggcgtcgagtggaactatacctacatcatcctctgctcgttcattgtttggttgatcatccccgggattggtcttctctacagtggtcttgcacggagaaaatcagcactggcattactcttccagtcgttcatgattgcggccgtgtacgttaaggtcttcttcaaaatccacgcgtacatcgtactgacaccatatatcccgccaggataacgttccaatggatgttctggggttactcgttagcctatgcccgggatgcaagtcccttcattggaacccttaagaacttcggtctgagaggtgtgatggtagcaccatcgcctggctcggcggatctcccggagattgtgttctgcttttatcagcttctattctgcgcatgcacggtaagcaacacataaaacagaatgtcgcgagactggatctaatggaatgctgcggtaggtcatgatcgttgttggcggagctttcgaacgaggcaacatgatcccctcgctgatcttcggcttctgctgggcaaccgtcgtctactgtcccctagcctgttggacctggaacagcaacgggtggctgtataacctcccatcacttgatttcgccggcggcggcccggttcacatcgcatctggctggtcagcattggcttatgcctttgttttggggaagcgcaaggatatcgacaagccttcacatgcgaaaccccacaacaccaccttagtcttcttaggcacgtccttgatctggtttggatggttcgggttcaacgtatgtcacacctgtgccttttctaaactcaagtctgacagcagagatttcttagggcggctcgactctaaatgctagcatgcgggcaatgctagcggtatttaacaccaacactgcggcttgcacaggcgtactcggatgggtgctggttgactatattaagtatcgtgggaagttttcggtcgtgggggcatgcgaaggcgcaatcgcagggctagtaggcatcacgccagccgccggatttgtgtccgtgtggcttgctgccgtcatcgggttcctcacgagcatcgtctgcgcgctcctccaaaacatcaatgagtggttacacatagacgaggggatggatgtgttcaagctgcacggtatcggcggaatggtgggggcattccttaccggcatctttgcgtcgcaatctattgccgcgttggatggcgtgaccgaggccactggtggcattaacggcaatggagtgcaggttggaaaacaattggccgaggtgtgtgctatctcggcatattcttttgttgtctcctgtatcctgctttacattatcaatttcataccggggatgcagttgcgcgtgcatgaggaggtggaaatggttggcctggaccgcacgcagtttatcgatgagcagattggtgagcgggcgctgcttgacgatctatgcgggtcttcatcacctgcaagtgtgcttaatgggcagcttcctgtagtggttgggtctgagggaacgaaggaatgaccgggttagagtctcgtctcgtgacttcaaatcccagaattgtatgtcgaacatgtaacttgtctcagatattaacttcgatgtttctatttttattttttatttgccatctcgcttctatgtataatgttttagcgagagatgcccaagaagaaagcttgtgactttcagtgtgtgactgaatttgtttgtttatttgtttgttttgttttgttttgtttttttttttttttacgaggattctaccatacagtaacaggggaataggaaaagccttcgccaagacagacccttgttcattagagtgacgcaacgaatctccccatcggcttccaaggccggggaagggaggggctgacgtatactttcccctctccccggcattttagtgtcctgtagggtccttttcccaagctgcattccatgacgacgaggctgggatacatatccgcttacaatgtatcgactaccccgtacctacagagtactatagttaataaatagtgaagttgagatagtcaaggcccaagtggaactgtccctgtcaagattaaaacaacgtgattagtctgcatgccgcagtgagatgtgtacacatctgcaggagaaactaagtctgtagtacattcgagattgtacgttggagacattggatgttattcccatcaaatgattgaaaatctgcaggaaaaaaaaagaaaaaaaaaagattacccggtcacagaaacttaaattacccataaattaccccacttttcccaattcggaccaatctgtgcccattttgccactgaaaattccgagtccggcccgtcatgtttcgtaccgctccggagtcgtcgcgtccaggccgcttttggcactctccttatctttcttggccttccaaggttggctgtctctctcctcactctactcttcactctcaagtcttctttactttccgtcattcgtttaccccatattcttgcaacctaatttgacaaattgatcctctgcttcattttgagcagtcttgtcatgctctgcgaataatcaaaagtccaaatgggcaaatgtatgcagtcctaccctaactttcatgatgcggcaaattgacctttctattagggcgttatggtgtcgtcctagacgcaggatcgtctgtatgtcgactcatcccggagactcggagtcatgccactaatcaactgcacaggggactcgcgtacacgtttaccgatggctacgaaattccgcggcacgaaagaacgctcatgtggaggacttgaaatcgctaccggaaatcaaaactaaagaagaatggacgaagaagattcacccaggtgagcgctgctcaagccaatacggattcgtcgacaacatactaacctatctgcgcaaaaggtgtttcttcattcgccaacacacccgaattggttggatcagaccatcttgctcaattattagaccacgccaaggggatcattcccgcggaagatgccaaggacactcccatattcctccttgccactgcaggtatgcgactgctaggaaatctcgagcgacaattgcttctggaccagatctgttcttatgctcgtgacaactcaaactttttacttccggactgtggggttcacatccaggtgattccgggcgtgaccgagggactatacggatggattgcgacaaactacctgatgggatcctttgatgccccggagaaacacgaccatggaaagggacacagcacctacggattcctcgatatgggtggcgcatcagcccaaattgcgttcgccccgaatgttacggagacagagaagcacgccgaggacctcaaattattgcgattgcgaaacattgatggatcagttcaagagcacaaggtttttgtcacttcgtggttagagttcggcgtgcatgaagcccggcgacgctatctggacgctttgcagatggcaattgggccaggtatcaaagaaatgcctgacccttgtcttcctagtggattgcgcaccacacttgatggcagggttgcatcggcgagcgagacagaaccttatctgctaggcacgggcagattcgacgaatgtctccgtcagacatacccattgttggataaggatgctccatgtgcggatgaaccgtgtctgctaaacggcatccacgttccagctatcgacttcgatgttaaccattttatcgggatcagcgaatactggcacaccactcacgagattttcgaaatgggatacaaggacaaagcatacgatttcaacacgtatcaagaacgggtccaaacgtattgctcacaagattgggactccattgagcatggccttggacagcaaaaatggggaaagaaggttgatcgccaaaaggcctacgaagtatgcttcaaggcatcatggatcataaatatgctacatgatggcattggagtgcctcgcgtgggcttggagaatacgactggctctttgcacaacggcaccaaagaagtcttggctcatggaaaagaaaagggctaccttgatgctttccaggcggtcaacaagatcgactcgaccgaagtgagttggactttgggcaagattgtcttgtacgcgtcttctcaggtgcctctagagatcgaagaaggtcttccagtaggctttggcagcaatgtccccggtatcccggccgacttccagtatcccagtgttcaactactaccggattcagacagcttccacagtgagcactggcatgatgcgctattcgacggtgattctccgcgccgaatcccaggcttcgtcctcttcatgcttatcgttttcatggccggctttttcttatgcggacgcagccgtcgatcgcggcttttcaaccgcgtgagtaacgtgttgcgccgtggtgggccatcgcatcccaatcatccaaagaaacggaagggactcaaatcgatgctgccatttatcagtcgaagtgccccatcttacgagcgagttctcgaggacggtgctcaagagtatgagcttggtgccgtcgagtccgacgggagcgaggatggtggacgtctttccgaggcagacttggctagactggtaccaccgaagcgagcgtcgagctggggcagcaacagcaacactcccagtttcaaatacgcgttagataatagttcgaccgggacgattggtcttgggatcagcagtggtggtggtggctccggcatcgctatggaccgagcaggcttagtagtcaggacggagagcagggaccacctagctcccattgctctaggccctacaacgaacggccgtcggtcaagagctggtagtccgacgagatctcaccaaaaatcacccaacatgacaccactggccgacgactaacgcgacgtgctgacctgaattatgcttaattacttacactgcattgcatttccacttggagtttgattgtctgatgcgtcgactcatttcgacgttgtcttgtctttttctttttcgcaaagggagttctcttcttatggtgttgcgtgcgtcgtggcaggctgctttcaattcttcatatcatatttcaatactgtgctctggagtacctttttgttggttggttacggtgctttcgttctcaggccggtgatttacacgtaatgaggtatgtactattagtgattgagaaagcttttcctgaatatagattaatacattgctagagtctgctttgcgttcaaatcgtacatcttagtatcaatgagcatatctttatcaatttaatatgctagccctagtggtcaactacctacatacagtgattgttcacacgtttcaacacatttggttatataatgttctgctggcttataactaattgatatgaattcaaactatcgatcttatatggtatataccaatcctggctttcaatgacagacagctctaattcgatgagacattgtctcggagagatgccacagatgatctagatctatcccatgcttcatataggccgcgtgaactatataggtaggcggtgtataggtggggcttggatgaactgagcagttatcaatagtatcacgtgttagttttgctaccgccttggcaaaaacgatgtagagagaaactggcgcaactaagcttccgattcactcgttgcattgattcaccaagcttgttcaatattcttctacagcacttcacctatgccgtcgcgttaaaccccaccattccatacaccccttactctcggcaacagctctcatcgccaccgccagtatgcgcttgactactgagctcattcaaagttcactaacttacatcaatccgctcacagatcgtgagctggatctccgaggtgagttcacccactatagacctgcctgaaaagaacaggtactacacttttgattaagagctggattgatatcgtcttttgcgtggtcgtgcaggtcataagatccccacaatcgagaacttgggtatcgccaaagtaagtgctttgtttctttcaatctttgagaggcagatttgtccctgttacttctttccgtgttactactagaccaatttctggtctgcagttagctctgttgtacctatatgaatccaatgttgacagctcctaggatcaagatgcgatcgatttcaccgataatgacatctcctcccttggaaacttcccccattttcctcgtctccgcactctccttcttgcgcgcaaccgtatcaatcacatccaacccgcactcgcaacttcagtgcccaacctgacgactttggtcctaaccgcaaacaatgtgtctgaacttgccgacctcgatccgctgcggaacttggggcgactgacgcacttgtccctcttgcaaaacccggtgacgcgcaaggaggtatgtttagccctgcgccgtatactagttagatccggctatatatgacatggtccagactcaattggaagctaaactaaccgattcctgcagaactaccgctactggactatctggcgcattccctctgtccacttccttgacttccagaaagtgaccgacgccgagcgcgctgcagccaaagagctattcggcacctatgaggaaccctcgtccctcgcatccaagattatgggtgtcaagtcccgcaccttcgacgtttctacccctgctgaacgcacccccgccgaaaaggccatccgagtgcaactcaccgacaaggagcgcaagcgggtcgagaaattgattcgcgaggcgaagagtttgcaggagattacaaagttagagaaggagctcaacgagggacggatacccggtggagcggatgccgatggtgacgaggccatgcagatgtgagggatgagatgtggatctctcgcatgggttgtgtcgtggatgatgaacatgcaatcacgttttgtctttattttctcattttcttctcgtctggagcttggctttctgggtttcttttctggccctattgtatctgggtattcatttattcatgtgcccttagtttgggattgggaaaaaaaatatcccagctatgaattgtgagcaaaagatcatttgatgctctaacataaagtacgtgttagtctatcaggctgaatctagacaatcgccgagctatcctaaatggtctgccggctatcctttgcttgatgacccatctagcagcccagagtttccccattccatgtagagatggaatataccccgaagttatgagtgaatcccacagaatattgggagtccacgggtctacggttccactgtattggcaaattagtcagcatgtcatgtcccgttcaggtgatattccccgagtcatctaattttagttaagagttacataccattaatctataactactgcaaaggtatggagtatacggtgtacattcgtcgcactgcatgtctctaccattagacgatgcaacctcggtgcgttggcagggataagacggcacatagcgtgtaggggatataattaaacgaccatcaggaaatggcaaaaagtatcgtttatgattcagttcatatattgtatgtacgcaaaacggaggttggttgtggaaatacctgcaaagttccgatacgtcatggccacctagtgatttcaggactactgtcttctatatcttcaacggcatataagagttaccagaatatattttctcaactgtttccttagatcatagcctatataccgatgcgtattctttctaacctcgaatatcggttacatcgagcttgtgtgagatattatggaagtcccaatagctctagttgacgcacacaactcgagaagaccatccccactatggagtatactctgtcgaagcttggaataatgcagaaggcgggtcaagcctattcatgtttgaccgtggaaataccattcaagctgtgtcttcatcccacgtgttggttatctttatcccacgtgttgacctgagcgggcccttcatgtctgagagccacctaggtatttccaagatgaagaaggggcttggctagggcctgccaagtctcgtatttcatggcgatcacatcctaacacgagtgatgcgaggggaaagggccttttacggatgtgtgtagaggcttggttgcacttcatatccgcccataatattgatgaaatacgctataaattgcatctttcccaggagctgtacagagtactcactcagcattgttgaaagaaaagccccattggtactccgtaccaaaattccccatcatgcggtatacattggtcttcacgactcttctttctctctgcctccccgtcactatcgcgacagacccccgttactgccagaataaaacggttcttgatggtgcagatttcaccctcgaagaatccgcagacaatgctcacctccctgtgctctcaaagtactttgagtccaagggtaaaattgccaacatatctacggttcttcaatccgcgaatcgtgccttaagtaaaggttcgccctctgtcggcaatgggtctccctccgaggcatgggcttggaactcaggtgatgacgcgacagcgacttgggttccgcagggaatcaccggctctggtgatgctttgaatacgggaacgtgggatggccacgatgcgtgggtcgtcagttggtatcgttctggagaaagtgtacggcttagctttattgatcgcgcaacgcacaattatcgccatgtgatgcttgtgaatcctactgccgacgataactttacagccatcgctattcatgcgggtggtatcatgtggtacggcaatgtgctgtttgttgtcgatacccataatggtattcgtgcatttgacctggacaacatctgggaggttgagattgccgatggggtcggaaaaactacagatggagggtattctgcggatcaataccgatatgtgcttcctcagatccggtgagtctatctattatcttccttttgaccaagactgataccattcaaagcaattatcaatggacacccggctccgcttctcccttccgcttctcttggatttcgcttgatcgcagcgattcacccgacaccctcatggtgggtgagtttgtgtcagctggagaaactttcgacgatgccgcaaatacgcccgtccctatccgctatgtgaaatacgatctggattatgcgacccggaagctgaagactagtgggggcatcgcttccgcaagctgggcgtactgtgtcgatatacccaacgtacagggtgctgtttcatacgacggcgagttttacatctcgcgcagcacaggcaaagctcccaagcaaggcgatcttttcacttgggaagaggggcagacagcgacagagcacacggggtggttcatggctggaaatgaggatttgagctacaaccttgttcataaggagtactatactgtcaccgagtatgctggagatcggtacattctagcctacaaggtctagttctacttgatctgctattgagattatttccaatatccaccatcggtgacggtgccgacggagttgttaaacaaatataagaacaaaaatatcacagttgccatgagagctgatacaataattgatgggatacagtgaaccatgaaagctggacttgtctaaccttgtaaacttttatttatttcaatgacaacccttcggagactacatgcactctgaagtcactacagacgattagctattgactgctctaaccagagatatctaatatctgatcccccgaatgaaaacaagaatatctaagacttaaaaagacatcaatacaatcaaccgttattaatattacctccctgaaagattcctgatacagggcgctgattggattgatgctcaaatatttaggctggcaaactgcctgtaagtttccatttttggcatcatctgggtttaaaatattcaaagcacaaaggcttgcaaaatctcatgaaaatgcatatgcttcttcttctagtgtctacaagtctatcattcgatctcatactgaatttctaactttggatatgacctaactaagtgctatccgccgcgtattgggtgctatcgtcttaagggcatagtcttacactattcaactagcatttgaattgcatggcgaacaaacaaatggcctagtatattaaagatatcaagtgcaatttggtatgagtagtgcagaaggtaggtacgatgataacaagaccccgatacaattagacgatgaactcccgaagttttttcttgttgagaatttctccttccaccaatcgccctgtctcagtgactttcccattgacttgctcatagcgtaccagcgcaggaatgttcttagtgccccacgtttttcggtagacattttgggggttattccatctgatagatatcagttcaatgcaccacagggacacgctttgaatatgatttgaacaaaatcctgctcagacacgatggtaaaacttactctggcttttgtccaacctcgatgatagctaggtcaggcgcgtcatccccggcaaatgccttgttgatgtgaggcaaggcatctcgtacgtccggacaccaaggttgcttggtaattggatctggtgaagatatgaaggcaatgaataattttgagtccgggtttactgtcaggtccttcgccgagcttggcagtgtgagattcttggtaattggcattcttgcggcttcgtatacagttcgaacttgagtgcagggtgtagacaagaagtatgggcgagacagtaaaatatttttcgagatatgaagtcgaggcatttacaatccgacatgagacaattgtcaggtggcttttgttgattccatgactaagcatatcgcaattctggggcctggtggtgcgcgaggcttcattttgtcaacaattcaatatcgcaatcagtatcacgggtcctatttcccatgaacaaaggcacccttctctaatgagtgttggattgcaattttataaactggtagctatacattctattcttgtaagcctcagctttcagtcccttgccctattcactgaattattgatgcgtgaaccgacgtgtttttcctgatgatcttcttcttttcaagggacttttattgggctactatgtatgtggttagtgctaaattgtgaattgtggatattctcggattccccgaggctgggcgttgacacttttgtctcagattcaatgtgtaaaggtagaagcttggagaaaaaaataggcaatagattaagtgcaccatcttctgcttgcacaggtcaggctcatgaatttgagccacatagggtaccaaataaaacataaatgaagtcaatggcccctaaaaacgaaaacccgtacatttaattgacctggtcacttaagtctttggcctcgacgtcctttccctcatcatcctgtgcccacatgctatcggtaggctccccaggccacaaggtagcacagagcctacgcgcatctgcccagtcttcatattcaccatcagagctatacatcattagaatggattctctggacggatgtaacatgtagcatacctaagatcaatattcttcggcgccagcatcctctgagaaggatagatgtaacgaccacatcgtacggcctttcggcagtcttgcaaaaagtccactggccgggcttgcacagtatgaattgctcataggcatcttctccaaccccgttcagatttatgcctttctcagagcctatgaccacttttgttatctcatcttcatcttaagttgaaccagtgagagggacccggccttctttgatgattttggggatatcttcgatgagttgggcccaggccttttgccattcaggtgtatcccagccaaggatggcatagtagtgcgtgtaaatgtatcctattagcatgttgtcatctttgatgatgactagactgaccccatggttaaactgaagcggtgggagtattgtcagatgaaaaaggaggaaattaagctgttggaaggtgaactcagaaccacgtcacctatggggaatctgcataacctcacaagcttccaatcttgctgcggatagagagagggagaatagtgaagaaaagagtctatcaagtgaccatttaggatgaggttttacgttttactgcatcttttgagatgagccaaatataatcttggaaaaaaaattgtcacaaagcctccagtcctctgagcactttatccccatctttcattctttgtctaactgtaactgtctttcaaaatctcatagagatgactgaagcgagtgccttcacctggataacctagttaacgctaacatctctattaggccacttattcgataatagacgatcgatgcttagctccacagcttcgccatgctcttgatgacttgagaacagctgtccattcggcaaattgctatctaactacttctcgctttctggactctttcccaaacctcagtactcaacactcagaaatccaaagagctgttgaaaaggtggctcggtttgcgcgggagcaagaagagaatacggctcaggctgtgcaaaaagctcaaacggcattcgaagctctgtctcctgaacatcagcatggcttgatgcagtactacggggaagatctcaatttttatctcgaaatcgccattcctctggacctgtcgcgtactccctcaacccctttcagggaattccaggtgttgctatttgacattgaaaatattcaccgtgcacttgctcgggtacgtggagttgaggcgagcatcaccaatgtattttccagattaccgtccatccaacgactgctgctggaaaatcgggaggaggaacttcggctgctaaaacaacgcagctcagctgggattcaattgtctaggaaattctttgccttggatcgggaacaacagagtattctttggttatggtatcaagattctatggggatcagtggaatccggagggatgacaatgcggaatacccctactctgataggagctgagatggagataaccatgagcgtggggggattgtcaattacagcagtgtcccaacatgcaaaggtagaagaacacgaatggaaaggacgggcaaatagaggggaagaataccagacgcccgtgaggctgtgacagtctcgattggtggtatcattccttgaatcactgacacatgaatatccattaacaagctatcattgacctggaacccctgctataatttcctatttattggtatatctcgcattcttaatctcctctaaacattaccaatgcttgggagtgtggggtagataacgaggattctcggccagattgccgtgtttcgggaacttgtctttttcttatcctttgcaggtccactcctctatagcgcttcggataactgtccaaattgacaatggactctgcctcgagacgacgactaagaaggcgagttgccgacgagaatcgcaaaagggcaccccgagcgtatgcatcattcgtctgagacgaggcgtatccactaactgggcttagatgcgatcgctgtaaggccaggaaaagcaagtgtgtggaggcgactccgggcaaatgtcagcggtgccttgcaagtaacttggcctgcatgtttgggaggtattcagtccatgacctttaagaaagcgcttttttaacgtgaaacagggagaaatcgcctgttacccaggatactgcgtcgagtgaccttcccgaacctggtatagttgctacatcgaccagaaaccgagcccaactactgcaagatgatatcagtcatactgatccgctttctccggcatcagtcttgtcccaaaagctcgccgaacatgttgttgcaggtcaatctaaaagggccccgtggccaaacatcctctcccgtctgagggaggctttctcgctagatccggatgctgcacccgaagagagggacatggtcgccatgcaagccgtaagccatatcatatttcggttttgagcccatgtcaactgacgaatcctagcatatgacccgtccaaaggcgcttcatccatatgaggtggcacgtttacatgcagcaattgatgcattccccccgcgcctcatcgccgactttttgatttcggtattcataaaacatgcaacagatacattcttctactttgaccaggaccaaattctgtccgagattgaccaattctacacagacaccacctcgccgttaagatctgacttgagctttgtttgtcttgcaatggcaatattcgcactaggtagtcaatggacgcccctagaaagaccagatgaatttgcagtcagcctacatcgagataatgatgatttaggtcaagtgttctatactcatgccaaaacgcttatacccgacttaattgaccgaccctgtctccgatccattcaagcgcccttcttgctaggtgtctatctaatgccagcaagtgccatcggatcatcgtatgtctacatgggcttggctttgcgcaaagcattggcatttgatctccatctcaacccagaagatcaagcagttgacgaccgagagagagaggtccgatgtcggttatggtggtcaatatattccctcgagaggtacgtgatgggactctcgctgaaataaatctcactaaccacgtcaggtgtaccactatcaaactaagcaggcctcgctctgtcgatgccaatgtagtcaaagtaccacatccatcgcctctcccagcactggatcgtctgcaaaaatacaacaatattcaattccagatggcgtatgctcgtctgatcaagatcctcgatcgaattgccgaaccgtggtatgttgggccgattccgatagaataacaagcacttatattttatcagtagtggtgtcaccgaagcggaagaacagtcagaatccgaaggtctggcttctgatcttcgacagtggaagaagtccttaccgccagatttcaagcttgaaaacgtggacaccaaagactcaagatatcgcacgatcttccatctatatttgaattattactatgcgtggataaccatgggaaaagtcgcccttgtaacagttgcccgaacgagccttcgttatcatatgtttcctgcgtcgcgccctcctggtccaagcgaggccaccttgatgcaatcccgatattgcgcaaaggcgggcagaaaacttctcctactgttcgagaatttgacacaaacccgcaagatcactcgtttctcattcacggacttccagggatgcagtattgcgacgatcgtgacgctagtggctgggatcacagaacgagattcaggatacaatgctcgagtgaaatttggcttagactgtcttcggagaatggcaactggaaacatgacagctaaattgggggtaaagtttgttgaagccgtacagtcgataacaaacgaggccgcggagaagctccatcaagcgtcatccacggctaacgaaacgcaggatgtacaaaattcggcttcgacatctgattacaatcaatgggctgaatggcttacgaggttggaacgctctcagaccctggagcaaagagcaatccatgaggcagagcccgatgtgccctttccacatactgtactgcatccaccacagtcaagcgataatacgtccgattggaggactgctggtgaacagtatatcccggaaagctcaaccccgcaaagcctagcacatggttcaactatgttgcgggagttccagtctatagagtacgaccttttgtcgggattccagagtgatgatccagcctttctcatgggcttgactgggattgatgtcctagacttctctgggctcacataaatatgtacctagtgaagagggaaatgcccgacgacacaacaccaaccatccaaggaggtcagctagcaagcttagggatcatacagatctcagaaatcatccttgtatcctagaaaaataactttctgtaagcccctttccattatgtgtcgtgtatgcgtgatttcctgtactctgagctcccctatctgacatccatgaatgagggacatactatcagcaccccaaattctgctagtcaaatattcgccaattagaaatgaggaagaatgagcggtattaaaaattcagaaggcggtataactatccaatgaggaaggcggtagcagaagtcactgtatatctatttctgcctgagaaacaaggcaactatatttctgccccactacgaagacctagggagtagggagaatgaagacaccacaccaccatctttaactcggatatatttatgtctatcatcacactcgcaacaccaactgcgatgcaatgcaatgcaatacagtatacagcaataatcattgtactctcactggaatctgaccatcctccagcaatgcatcccacctactcttatagacacgaccatccttcatcacaccaagcacatgtgcatcaggcttatcaaagacggtcacatcatcaagcgggttcttatttagaatcacaacgtcagcatggaagccctccttgatttgacccagctcatccgcgcatcccatcatcttcgctgggttcacagtagcactacgcaagatctccagtgctgataagacctgcgagcgcagtgcaaattcatgggtctgcgcagagcccagtggacccagcaaatcagagccatagcacatagtcacaccagcctccgaggcaaccctcaaagcctcaagaccagactttaacacgatcgaattctttgtctgggactcaataggcaggtagttcttccaccgctcagaagccatctgagcatatgcgataagcgtaggcgtcaagtagacccccttctcggccatgagcttggcagtgggtgcatcaacgaagttcccgtgctcaataccacggacaccattatcgatacaatgccggatagccttcacagtataggcatgggccgtgacaaaagtcccggcattatcagcacattccaccatcgcctgaatctccgccactgtaaactgcagatgctctagcttatccgttggcgaagccacaccaccggagcccataatcttgataaagtcggcgccgcgtcgaatctcctcacggacagcagcaatacactccggcacaccgttgcacatgcggcctaggtggttattgtcgtgagtgccgccgcagcattccgtagcctcatgcgggccgcgcagatcaccatgtccaccaaattgcgagagagcatggcctgcgataaaaacgcgcgggccagggaagacaccgtcttcaattgcctccttcaaggcgagctgggcaccgccacagtcgcggatgctggtgaagccgcgatgcagcatctgcgaggctgtgtaaggctggcgcaaaaggtgtacgtcattcggattgccgaaggctttggataagtcactatagcccggaactgcgcataaatgtacgtgggcatcgaatagaccggggcagagatatttcccttggcagtctactgttttgaggctgattggtgaagctgggatggatgattctgagccgatgtaggtgattttgccctcagtggtgatgagggttgtgtttgctttgattgtgcctgtttcgacatcgacgatgttggcattgatgaatttgtatccctgtggtgcagggcgtatccatggcttgatgtctgagcccgggagggtggtttgtgacatattcggcttggggtgagatgatgctgataagccaagatatcgagtttaaatattaaatttgaaagctgaaagaaatcactttgcgggggtctctcacatttgtcgggaagttggtcgacagattcccgatgccatcggaccgatgcacttctccgcatatcaatcatatcaccgacaatcgaagataagccttcttttatagccggtgggaaatccggggcatatcagttttttttcccttgcaaacttgagcattcctcctctttgactgttttgttttgccgaaatccaattatctcattcgtatatatcaaggggcttcaatcccacctgtattaatggacaacttggagaagcgtgctgcgagtagcgacaatgccgatcaatcaaatggcgaaattctcgagcttcaggggagttacactgcggaggaagagaaaaccgtcctgcgcaagattgacttggtcattttgccttttgtgagtgcttcaagctgtctttcgggatctttttcgggctaatgacgcatacttccagatgtgcttcgtctttttcctgcaatatattgataagcagagtctcagctatgctggtgtcttcggtctaattcaagacctcaatatgacaagctcgcaatattcatggtcaagctcaattttctatgtcggccagctagtcgccgaatatccatttatatatctaatgagccggctcccattgaccaaattcgtcggtgcgactgtgtacgtttactcttgcggtactactatatctgtcctgatcatgcgctaaccaccaattcagaattgtctggggcatcatatgcatgtgcctcgcagcaccaaacaatttcgccggatttgccaccgtgcgctttctactcggcttcagcgaaggcgctgtctcgcctgctttcgtgacgatcactagtatctggtatcgaaagaaagaacacaatgtccgcacggcattatggatatctatgaatggtctggcacaggttataggctgctcccttatgtatggcattggtaaaaacaactcgcttccaatcgctccctggcgcgtgctatttatcatctgcggcgcgataacctctgccgcaggcgtggcattctttttcttcatgccaaacgggccgaaagatgcttggtttttgaatgcccgcgagagggaagtcctttcgctacgcatggcacaggatcgagatggtggtgacaaggcctctttttccgttgcccagctcaaagagacaataatggaccccaaggcatgggttgtcttttggtttggtgttttggtatgcatgcagtcgccggttttgacttttgcatctcttgtgatcaagtcgatcggctatactaaccttgagactatgctatatacggctccatcgggcgctgttcaagttgccttcctgtggatcggtgtcggcttagtatttatcttccctaatcagcgaacgctagtcattcttgttcttattatcccgcctctgattgggactgtcttcttgctgaagttggacgtgactgctcaatggggtcttattgttgcctcgtggctggtatgtatttctattgaccaggtcattcttccgttgctaacccagttttccgcagtcttcatgcattacggcatccatgacaccacttctctcacttgcggcttcaaatttcaagggaaataccaagcgcgctgttgtgaacggcatgtttttcattggttactgtgctgcctgcattgcctcgcctcaactatggacccacagccctcgttatacggagggtgtgataacatccattgtaacatggtgtctgctttttgtggttgtgattttattccgcttcttgtgcatccgagacaataagcagcgtgataaacgggctgccagttcaggtgttgtcagtgtggatgaagaggtcaaattggacgaaaatgggttgccacagacagatatcacggataaacaagaccgacaatttcgatatgtatggtaaataattgtttatatttgtttggaaagtattccgaggaggttaatatgatatttggcttgattttccgcatattataaacagtaggatcccagatggaacaagcaggccaatacacaaagttatgaagagaacacctttcggagttgaacttggtcattgttaccctgtgtagcaatatcatccttctaccttgatcaaccttaatatatgcagggacagaggctgtaacaatttgcataccatttttcctctaggagcacgccttgatgatatcggccgcacgctcagcaaccgcatagacggtactctgaaggtgaccgcaaacctggaaaggcatgacggaagcgtccacaacacgaacattcgaggttccgtaaaccttcagcgacgagtcgacaacaccaccaatctccttgggaagcatggcagctgtggtgatcgggtggaagtttgatcggtctagtcaaataaaaggttaataataaaattccctccacaaatctcccagaaacgcgaatgatacacgtacattgacctttgatgaaatcagcccagccctcatcttcagcaccagcagcaacagtagaaagaccggggctggtttcagcaccaaccatatcagcaaatggttcagttttgaaaatctcacgaataaaccgcgccgcctccacctgagaatgtagatcaaagtccagcatgaagtacttggggtcaatgatagccgccgcggtggggtccgcggaagagaggtgaacgctgccgcgagagaacggaacagacccccagtattcgctgctatacgaggttccagaggccgacagcaggatctccgcaacagggataccagatttaaagatcagatcccactggatcttaaagaagcggtatatgtcgcgggctttggtgatgttgccattggcggatgcaacctgtgctgcataagcgggaagctcgcgaagaagctcggctccgagcgctgtggagttggggaagagctgggctgctgaggggtaggcgacgtagtcggcactcttgttgctgctgtaggtttttttcgagtcgaactggagaccattgttcatttggtcctgcaggttttcgccgacagttggcaggttaattttggtggcgattccgtacttggaaagaatgctagtgagtgatttttggttagccttgataagatgttgaacggggaggtgttatggttactttgggtttccgatgccggaaagctcgagcagaacgggagatttcaatgctccagcagcgaggattacttcacgagtagccttaaccacggtggttgtgccattggaaaaagtgacctcgacaccattcgcagtgacctcatggccattcttccaggtaatcttgttggcgtgtgtgttgagccagacaaggagattgtttcggttctggtagggataatagtaggcacgagcagcatcctcacggatattgagctcagaatcaaccgtcttgggatacaagctgtatccaaccatatctccgccattggggtccaggttgtactgaacaggaacatcaaggttctgataggtagtgttcaatttctgagcaaggccgtcgttcaactgtgttgaagaccagccaaccttcagtggtccagtaaagccgtggtaggccggatcaaaagcaacaccggatccatccaagaatgggtactgtgccggatcttgcaagtgttcgccctttttgaagtaggggagcagagtcttccagttccagcccttatttccgacggtctcccacgcatcgatctgagctgcctgggcacggaggtacgccatgccgttgatggtcgatgttcctccgagtgcctttccggcacgtattgtttgtggggaaccaccggcatattcttgctctatcgttttgtaggcccagtcaatgtcggtatcaaacgctttgccgtatccgagagtgtcggtcacatttaggttgttataaacggagccgccggcttcgatcaccaggacagtggtgtcctttttctcggacaatcggtttgcaacgacgaggccactggtgccacctccaacaatgatgtagtcgtaagtcgactctgacttttgtgaggtgtggggaactgcaaccgctagtggaagcagtgcaaggccgatgaggctgcgcatgattgatatttgattctaagggaggagattcaatagtgagtagcctgagcgatacaacgaaagctgtgatttctttaacaatttgtctcgaggctacacggatgttttatacttcgggtcacaatatgatttacaagcatcgtggtccattttgtattcaggaacatggcggaactctttgtcagatcagactaatcccaacacgcgatctgcgtgtctgttactccggaataaagagcaaaacagaagaacccactgtctaccaggtatcccattcatcccgaaaccgtatatctaagtctaagcctaacgggctgaggccgaaatgagaagtagacccttctaaggttgcaattgtggatataatggataatcttagcacctgaaatctccgtggttttcccgctatagccccggtaggactattaaacttcttgtagtagtatgtctactcctatctgctgccaaaatctacgccagcagatccactcgatggctgcattaaccttggaaatcttactcattcttagtcaggaacaaatatgacccaccttggaagaacttggattgataatcgtatgccgatcttattcagagtttcgcactgcctacttctagtatatgcctaagacaaggtaaccggaacccggcttcgtgtttcacttgcttctacaagctgtttgagtaaaacagatggggatactatatccacgggctgtgcaatgccaagtaatatcctatgtctagggtcaccatgctcaaattgactacttctccgattttaagggtccttttagagaactttaggttgtactaattttcatctgataaaagaaaccgatctgataaaagagaattatgaacggcggtattctcggcccgtaaaatgtcagagtctccgagtcagccgagtggcgtcacttgtggatacaatgtggagatttatgtcctctgccaatgtacaaagtacaatattgtggttgatgaacagtctatagagaaacagttttcgacactaggcatcgacaactttcttggaataaactcggctctaacacattaccggccttgcatgattcacccatttgaaagagtaccttttaccaggtagaccatacaaaaggtatgtaaatgttggttttcctcaataatatcatactggagacttcattgtgagaattgggccagtcttgacattgaaggcataccggcatctccatcttgagcctagcaaatatgtgtccataaccgtcatatgattccaacccaaaactaaggaatatgtacaatatagatttcgattaatcccgtcgatcattgattatcatccccaggcattaaccttaaattagacgagcatatcgaaaggtaccgcaggtaaaagtggttgtgaaatagtcgaggtcatagggaatcgtgtttctgacgttgctgagctctacattgcaactgagaccgtatttcgaaacacgaagaacgtgaggtatgttaacgatattcaatttatattttacccactaattaccgaaaatatatattgatcatgttccctcacaatcctaccacgatcaacaaacgaatcattataaaacgacgcgaccttcttaggtcaaggatgggaaatcctaattctccacttgactttgatattgatcacttcccaagggtttgcaactcgtgctctccgtcgtatgaaccttgctcccgcggttcaagggttttacgcttagctagattatgggttaaccctaatataagttcatttcgttcgaaatcctataacctggtaatctctcatcgactgacattaattaaagatgcattcaggcacattttgagcttgtgaatgtcttcattcatacagcttagtagacctatctttggccgtttgcagagaagtttctcccggcttctagagcatcagtgttttgttccattgtcttcatggagctatttagaaggcttaatgaagttggagaatcatcaataacaatatttactcagttgatcgcatcttttctggagctagccaagctacgagaagtcatccttgatgttctatgtcgtcaatagtctggaactcggagttgtcttattagtcgggtaatggagcttttaggagattctaagaaaatctatcgaatatgaagctcttgtcttttgaagatgtatacaacataggcaacatccagagaaacaaaagtattgtgcattgttatcgcgtaaaaagaacgtattgccggatatccgagagctcggatatataagattctgtgacccaacatcattcaatgaagaatgacttcgttcccgatttttccgacactcatatatcacgagcactagaacggcacttccaattttagtgcctaagagtctttagcgttcatcttgctgatatgattcaggccaacttctccgaagccactgttatcttttgcggttcatagtggatcaaattgataggtgttggctgtgaattttaaccaggccaatcatcatcaaactttgcgtaagccccggttttatttttaacgccataggactggtggccaaaaaggtgggagatgggttcaaaaagaactaccggcgactcaaatcttccatttcatattattcactccttctcccaatacctgaaaaggttgtataaagattgatcatgggggccgacagtatcaatctaaagccggtcgagtcggcgcgctcactcgcttcgactttctcgcccatccacgaggtctttttcgttgccattgtttgcatgggtcaatttatgacacaaaccaatgtcggagtatgtctttcgccgcttgatactgtcggtgatagctttggtatcgacgatcccggcatcttgagctggttcatggctgggtactctttgaccgttggcacattcatcttggtgtctggccggtgcggcgatctgttcggttatcgtcgaatgtttattattggattctgctggattgcgctttggtctcttgtcgcaggtgttagcgtctattcgaactatattctctttatctttgcacgtgttttccaaggcatcggtggcgcattgctgatgccaaacgcattggctattcttggagccacgtacccacaaggaaagagaaagaatatgattttcgccatcttcggtgccgctgccccaaacagtgcccttttgggagctgtcttcggcgcaatattttctcaattggcttggtggccttgggcatattggacccaggctatcgttgctctctgttgcgctgcagtaggcctgctcgtgatcccatccattcatcacgacgctaagtttgagaaatccttcttgggcctgctcaaagctctcgatgcgcttggtggagtttgcggtatcggcggcctagttcttgtgaacgttgcatggaaccaggcgcctatcgtgggatggagcgagccctacgtgtatgtccttctgatagttggaattttgttgctcgctgccttcttctatgtcgaattccgagtctctgaaaaccccctcattccgttccacgcattcagtcccgatgtctcgtttgtccttggctgtgttgcttgtggctggggctcattcggaatctggatctactacttctggcgattcgaagagaagttccgtcagttgactcctctcctgacctctgcccagttcgttcccgtcggcccagtgggtatcatggcatgtgttgtcaccggctggctgatgggccgcatgcgccctgcgctgattatggtgttgtcgatgactgctttcacagtgggcaatgttcttatagcaattgcaccggtgcaccaaacgtattggggactgacatttgtttgcttgttagttaccccttggggtatggatatgtcgttccctgcagcgactctgatgttgtcgaatgcggtcgagcgcaagcatcagggtgtcgctgcgtcactggtgactactattgtcaactacagcatctcgctgagtttgggattcgctggtaccgtggaagttcacgtcaacaatggaggttacactcccagcgatgtcttgaaaggatataggggcgcattatatttagccgttggtcttggtgggctggggatgtttctcagtatgatatacgcattcaagggccatcgaactgagagacagccggtggaagccaaaaacgaggaagcttaggaataggctatcgtctagaagtacgtaagatttaatcttatatcagtataatatcagttaatcacctacaacgcggtcaagctaagcttttagcaaaagtgagtacaatcatatatgggatagacgacaaggggtaaacaaatgagaagagccgggctactaagacttgatcctgaaaatgaggctttattgtcgatatcgtggagtccactggctccataactcaatgccgcacatgaagtattctagacctttgatgtacatctctagttcatgtgtcaagccttccatggtgttgtgtcggatttcaacgctggattgtttgaaaacgagctccaattcccgacaatagctatacattaatcgtctgcaggctgtatatggtagtcctgtctcgttcgcaaggatgtagatggcggagaatggctgggcaccatcggttgggttttcctggtatactttccattctcgctcccagctatagatatcattcataacactgacatgcctaaatgcggtgctttccaaagcggctgtattttcaagtgcggtgggagtgagatcgagcttggcaccaaatctaatgagggctgtgtagagtctaaatggccgtcagtactcatcaggaatgtctgaaaatgaacagcgacagtaattcatacgttttgcccacatctgtctccctgaatttgaggtatgacccgagagtgtttgctgtggttctctcctgggacgtctgggcttgcagaagctgacaaaatccctgggcgacatcatttgccagaacctcgtccatacttcgcatggccatgacagtatcgtgaagcatccactcaagacagatacatctgtctgggctcgctgctccaagggcaactttcatgagtcggtctcgatacgacagcatttgcgtaaaactcattttttcaagttggtctatctcgagagtcaataaatggccgaacccagtctccggctatcagaactcaccgtcaattagtaatgacaagtaaagcattttgcatgtcacatcaatgcgatcatatagcgtcaatgggaaaaagtgactaaaggcgcgggataacccaagaccaaggaacccctttttctccttctcactagggaaattccaattgtcgccaaaataaggctcaacctgagcttgaatcaattcccaccctagtggatgggtttttgattccagttggcttgctgggatcgcgcaaggagcattttgtgctgttgagtactgcctggccgaattggaattgtttgttgagtagagataggatgaaaggattggccgattgacagccaacgccactttacgtcggcgttcatttgtcaatttcttccagatgcatatcctttgaatccgatgcattgcaacttctatcaattgcatcagtgaggccgggctttttggttggcagttgtcaatctccacaacggaggctgcacacatttacgcacggaccaccgaaatgtgatgtcaccaacatcgatcaaccgtgggcctgccactcttcttttatctctatttctaccccaagtttgcttcgtacaacatcctaatatttgtacttacaacaccaatcgacactctctccttaccatcatcctatcttgaaggctgaattccctattagctctatccccaccaatccgatcatcggcgtttgcaagagaaagaggccaagatcttcgtgcatatggttctagcttctacctctatcagccatcagagctctctgcaggtggccctacgacgacttagtgcaatcaaggtagatagtggaagtctctcaacaaaggttgtcacaatgagcgcaccatcaggtccgccacgtgccccatggcgcgatctccttggctctcatatcgagcaaacacctggatgtgaattcacaattgcaacaattggctacaatgctcaacagcatcctgtacctcgcctgcggacttgcgcctgtcgtggtttcttcccagaactcgagctcaacgctaagggccaggaagctatggatcagcaggtggaaggcggtgctaatccacctgtattcgaaagtgacatgctgtcatttaccactgatgctcggatggacaagcttcctcaactggagtcctcgggtcatgcgactgaggttgtattctggctgaaggacctcatgactcagtggcgtgtcaaggggacggcatatgcaattggcaacccaagtggagaagatacagaggaagagaagctatcccgaactgagataaaaaagggattgagagtaaaggggaatactgacagtgacattgcgaaatggacatgggaaaaggctgtcacaaagtattttgcaaatcactcccctatcgcaagaggtatgtggtctctatcttgattcttgggcgcaagtgctttatgccttgctcttatgccgattgaaaaccccgttcgcctgtcatcgcctgctcatactgactgggaacctaggtttcttccgatcccctccccctggacaacctagatcctcaactcctagccaactagatctcaagctaggtcaaaaagttctggaccttcatgaccctgttgcacgggcaaatttccgagtcgtcatcattcggcccgaagaggttgagtgtttagatcttactgatcaagagaacggcaaaagatggaactggacgttgattgacggaagcgatggttctcggtgggatgaagccgagttgtggccgtgattctaccaatattgcaaagacacttgttctcctggataagttgtatccaaaaaatgtgtaatcgctgtcttattttgatatttgcatgacatacgttggatgttttcatcttaggttataagggtgtatatctataggcttcaatagagtaccaaaaacggtcaagcgaaatgttggtagtttgcataggatctttgtttgagcagtgtctagtgctgaaacttgcttgacctgagattttgttgtgctttctggttgtcgcctgcctgaaagaaccctcacttctaccaacttgtcacaactttcattcaccatcttattctatctcattagcaaaagtaacttccctcaaaactgatcccttgacctgccttatcccaactaaatactgaccacggacacgttcatatagtgcctgatactgagatgcctagcgataaccctgcctgtgctgactgtaaggccaagaagaagcggtgcattcaccgtaaccaacctgtgaaggtcgcgaaagtcgaagccgtctcagccagcatgtctgccccctccgccaccgctactgttctgacgcctgcgtccactccagtccctgttgctgttgccggttcctccaccagagggcgacgtaagaccgctgatgccacaacgaaggtactgacaggtctgccgttgacttctggtttggattgtcgtaaagctaacacacagaacataggagatgagtcccgctcctgccgactccagcgacgagctttcttccgtgccctcggaggccgaggagaagccgatggccaataaatacaccacgcacagtcgccgtgctaagacctccgccgcctccgagaacgtagccctggcccttgacctctcgggtgattctcttcaggccgctgccaccatgtccgtccaccgtgtctgggcccgcgaacttcgggacaacctccaggaactcgagaggtgtatggaggccttcgatgaagctcaccgagctaccatggcctctgctcaggctatccagcatactgtcgacggctggattcagacctgggctgcttctggtcattaagcattcccaacgttcaccatcgcaccattttgtagcattggaatgggtacttgcggtcatttgagatgttattggggggggaactactccggactggttctcatttgagaagaggaaattcttcggttcctgatatagggcgtgctcgaccaggtttggacaattcacgtggctcggcaccgattggtttctattttggtatgcctgcaagcatccaggcctatgaattcgacatgtatgctccgtatttgtaggctgtaatgattcgcatagcgcaatcttggacactagaatacccatcaagatttgtgtgtgtgtgcctaaacctagagacctcaatgttgtatgtacaatatactgagtactccgtagcatttttcaaaatatttgaaagttgtcgagtccgagggggtcggggacagaagtacttggtggatggggtttttacgatacataccagcagctacagcctatcaatgtgggttcccccttccccccccccccccccccccccccccccccccccccccnnnnnnnnnnnnnnnnnnnnnnnnnnnnnnnnnnnnnnnnnnnnnnnnnnnnnnnnnnnnnnnnnnnnnnnnnnnnnnnnnnnnnnnnnnnnnnnnnnnnnnnnnnnnnnnnnnnnnnnnnnnnnnnnnnnnnnnnnnnnnnnnnnnnnnnnnnnnnnnnnnnnnnnnnnnnnnnnnnnngtcccccctcccccccccccccggtctccaaccactgactctcccgagtcttccgcggaagggatcgtccggcttccaatagcgtgatagtgtgccagggtctcaatttttagtgtttgtttttcataaaacacaggtgcttttgtacaatgtaaagtccccgaaagggcacttacgtgtcatctcctaccaaaggtacccatggatatcgacaagactattatttgcctcttctattcggcctggtctgattcgactttcgacagcaatctccccatttctgttgccggagactcgactttctaaggatgggcgcttatacagatcttctgtcatactgattatcatgaccttcttttgagcctatgtcaaaacgctaccacgtctaacgatcaatagtatacaacatagagcaagctaaagtagggctccgtacatttggtcccttgaaagcaatactagtctagtcagtctgcacaaatagatactaatacatgtagcaatcctacctcaccgctcaagtgattcacctacaattcctgcaggattcctatcaaatacatcacataggggtgtcttttccgtaccgaaactgcctagccccatataaatctttttacaaatcggtacggcccaccgaacacggtagttaccatactggtatcatacggctcttcgattatctcaatttccaaccctcttttctttcccttgtgcctattcacttcccctctccagactctgcttcaccgttacttgatttttttaactgcagatcctatccaacgcacagctcattattgaggggttcctaaagacgccttctcttccaccctaacccacacccgcaccgcgatctaccttctccgtggcacaactttgtctcttcgccgtgaaccattacgattctggtcgacttacgatttacgacgaaacgaacaccggaaacacccgctcaaatataatactttaacgcttgattctttgatttccgtgaaagcgtggcaacaccggggattcagcaatcgaatatctgttagccatggcatcaatggatgctctaggggccttcacctatatgagagacaatcttcctgcatggatcacccgcgtctcagagcttgctacacacacccacaagagacacgacgagtactctgaagcttacagacgccacgtaaacttcaagccccgccgacggaaaaatagctcggtttgctccattcataccgatgacctcgttccgatcgcacaaagaaagagtcccagcccagaacctgtggtagttgggacatcgcaggatgcgcccgagcaaggccaacgttcagatcgcaagcgcaccacagatgaggctccatcagtcgagtccaatgaagaatacaactcgttggtaagcacacggcacaatgtcatcatcgagtatgatggccatacacaacaaacacttgaggcaattgtacgcgatatcggggtggccaggaacaacatcagacgagggcagatgtcattgatgccacgtacagggctgcgagcgagcttgttgagcaaaggcgtgatgaatatgccaagtgcactaggacagacaggcccactctcttgtgttcgcagtactcgactcacatctgggcttgtcggtatctccgggaccagcgcacttcggagagactccccttttgactatgcagacaagcagctggaacttgcccattcgctttgcgagacggcatcttaccaagtccttcgatctggcgattgtggaacggaactggacggggtcgaggagaagttcaagatgctcctcgcgacggctatcaacgagatcgaccgtatcacggcagaaaagaagcagcaagaagaacaggagcaacagcagcaagaagggaccgcggaagagggacctcccaaaccgccccctaccccctccgcagcgcgactcgcaatggttgcttctcttgcaatgaacaagccctcgatggccacggcaggcaccattgaagtcgatgataactcgtctctctcggctgaatcgattgatctctctgcattccggtcctctcggatctgagtgtacacacgggcagccagcacttgacctcatattagccatttagcgtgtgttgaaccccttccagcaaaaccattgcagccagttgataccttcgatctgttgaggccatctctttctctttgattggccttggttttttttgcctttctgcatctttgattgcgatctgatttgtagttgcgggggcgcatacgattacaccattcattcccttgtttgcggtccatgttctattcctccttcttactgtcttttgatcccatttttgaatattgctgttcttgtttaggatacatacctcctgcctgtctcttgcatcagctcatgactcattcccaagggagcacggcgtttttatcactatttatgtgttttcttctgtggcttgagtttcttcgacctctctgcgttcattacaccgatcattataccgatccattctgagtatatatttatggcatgaatttgacttgttcgtggaatttttagctccgttggcaaacttgcatgcatgaggtcctatgcaacatacaacaaagaatcgtattacattcaaggcgtaacggtccggacattccatgaccgattgagtccagttccaccaataatgtggaatgtactccgtacaatgacttccctgtaataatcccatattcagcctggaatgtcccaatgcatgaccgttgccgttccctgtctcggcacggaaagacaacgccatgcatgtcttttgattgaatgattcgctaagcaagcgaagtcgccacaaggacgggctccgttgcgggtccgggagtcatcgagtggttgatactgtaaccgtcctaattaagtataggcttaaggtggagataatgagtatgtaggtgggggggatcaattctttgtgcaatatatgttgtacatactaactatcatctgcgagtgcattgccgctcaaagcgtctttattgttccaagctgcggattacaatatacgtatgtacgcatctttcaatgtgtcttttttgagaggaaattcaattaaaataactatactccgtacaatgtactaaaaaaagtccctaatctagccatgcgtgcgtggacatgatatcgccatgcatggtctagacacaattttttcggtctatcatggatgtagcaggtgaaatcataacaacatatgttgctcccacctggcaggatgtgggtgcagggatcttgcttctcgaatataccaaagtacatacatacaatgtaattatattctttccctctgattctatggacttcggcagcctctatccctaggtctatccctaggtcctccttgggaaacagtggttcttttgagcataagctctaaagatagtgaaagatctcaatccaactaatcaaatagaaatataaaatgctatatgcttatcatcagagcggacacttgattcttatgatattaatacatacagtactccatacagtaattcagtatgtattgtacggtgtatagacctcccgctcgcccgtctccttgccgatcaacacgctgtcaactttaccttccccttttgggtggcacggataattattccagttgtttttttcatgggacaaaggtaccatgcaggagagggggagaaagacaaatttgagtctttctataatagcattgttttcgaggttctgctgtgcgaaatacaacatactacaacatatatcgccgtatattcagaaatgcgtcctacacctaataggagatgccgcaatagatttacagtctacatagaagataacccaaattggtatcatggcccccacccctactagccggaattggcgggtgttaaaggataagccaagcaagccaacgcggtgtcctaccggaagcccttaattaatcctgggaaaacaagtatatttccatcgcccttggcggcattggccctgtctctcttacttggtgctggatttacaaggatgtgaatcaaggtgcacatcctatagtaggctcctgccttgtttggaaagaggcgattctactagcttactatggaagattcttctaatttccattacagttgtctcggggagatgttagtacttctggatgtgatgtctatattgtggcataatcaaatctcgcttgtaagaatactccgtggtgtgctggtacacagcacaaacttctgtgcgggtattcaattgtactcgaaagaagcttacggagtacttgaggtgaaacaagatattttgggggtttgggattagatacgagtaaatgacagtctagaactagctgtatcaatgacctcggtctcgacaaaagtacctacatgtcacatgtgcacaggatgtacttttgtaaagtacgaaagaagattgatcgtatctacaacttatgacaactgtagtgcctacgatgtactgtgtagcgcaagcctcggcagtagagagccagcttatttattgatcgattgataattctcaatccggtggccgcatcgcgatttgcaatagatccgagaagtcatttacgatatacgaagtgaagtgccccatagagaagaacatatactatatattcgagaaaggtgagcaaccttactatagtaattacatagaattctttacaaacccaggagatgaatgcttgatagtcaagttgtagtttccgaggaagctattacccggttctagacgctcttcttcaagcccaacaaccatgcaaaacaggcaagaaatccatttaaacattttgatattaaaaataataatcaaaaatagaacttgatgcattgacggggaatcgaaccccggccactacttatcaacacttcagggaagtatgaaatggaagagtagtattctaccactgaactaccaaagctgtcttattggttctgtcgccttattacgaaatctggcatctaaaaagttgaagcattaattccctagttttatagaactacgaggtaaaatgatatatataaatttgccgtaactagtaagtgtacagtggagtgctaagggtaacccacaacaatatccgggttcataattgcttcttaaagtcagcaaagtagagattgaccgacttgacctctagggctggccctatggaatgcgcctactgaagtgagaagactgaggatgattactgagctgcgaggactggaactttaccttcggagggccgcacatggaatgtactcgattgtgtaggggtggtgtatttcgcagttggaagtgcggatgacacactcactcactaattgcatctcaaccgtggcatgtgcttggggaattcgtgtgatctagttagatcgacgagaggcgtgtacaaaggaaagagcctgcgctggaggtttactcaagcaatctacttcgctgcgtaagatcaagtgctcgagctaggtactcgatgtttgaacaccccagatttgattcaccgtgtttctctacaagaggaactacaagcggatcttacttaatgggacattttgatgctgctggtgagccggggtaactcggcgaggtattctgtataaataggatgttttggcagcgtggatgtcaaggtacacaaccatcactataactgtaatttgacatattttgattcagtatcattcatgtccaatcaaacatcaaacgcaactaaacggatatcatcactcataaccccttgttccttctattaacccattgaaaatgctcaacatagcccagccctggaatacagacggtacgaaataagaaaaagaacaacataatcaagtcacaaaaagcaacatctcgtctcacatctcctcgaaggcacaatcaggatgcatgacgaaaaggacctttccgtcattttgggcgtcgtcatcggttccatccgtgaggccagacccggagatacgcagcaagagcttgtcctatagagtaactttattagtgacgttgcttgatggaaatttacgaatattgccatagcaaaggaagatctactaaccttaaccatgcgtttcaagaccttgcctgccaactcgcgctcgcgctcgtaatcttctttggtgttaagttcaccctcaatttgctccaagtaccagagtacaagatcttcttgctcgacaccctcgcccgagttcacctcatcctcatgtacccgcctgacaatctggttcaggatcttggcgtacttgtcataggtgatcttggtcttctggcgttctggctgggcagcagcttgagcaggctctgcaacgtcacgcatagggctgtcgccatcattatcgccatcggccatatcctggtcttcatcgccatcgttggtgtgagtaggtacatcatcttcaatctcaacatcatctttctcgacagtcacgatactctggcggagaagatcgtatgcctcaatgacgaacttgggaactacctcctcgacacagttggccttggcgacagcctcagacaaacggatcaaagactcgagctggcgaacagtgatgcggtatgaagagcggcccacgcctccctgggcgtcgttggagcgcagctccttgtatttctcgaccagcagtgtctttgcctcctccgtgaagactgggcggaatgtgcgtgcgaaccggatgtagcgctgcagttgttctgtgctcagctcgggctcaacagcctcatcgcggtacatgtgtacgttaacaatgtggttggccaaactgcggtcaacagactcctttggatcatcgcggataacaaagaacacatcgaaacgactcataatgggagcgctaaagttcaagttgttccgaagagtttgcttcgggtcgtaacgaccattaacagggttagcggcagcgagaattgatgcacgggcattgagagtagtatggataccagccttggcaatagaaattgtctgctgttccatggcctcgtgaatagcgacctgatcggcgatatccatcttgtcgaactcgtcgatggcacaaataccaccaccattctataaggaacatgtcagcgatgagcccacactcagttggagccacatttggaacataccgcgagcatcagtgcaccggcttcaatggtgaactcgcctgtctcgggatccttcaccaccgaagcggtcaaaccagctgccgtagaggctttaccactggtgtatactgcacgagggtgcagtgagcagacgtatctgagtaatcccgtcagcaagcaatgtctacatatgaggagtgggcaaaacttacttcaagaactgactcttactggtcgacggatcgccaacaatacaaatattgatatcaccacgaagtttcatgctctcaatcgatgtggacttgccgacaccaccaatcaactgcaaaagcagacccttcttgatttgacgatgaccccaaatcatgggggcaatcgaatccacaagccgagagtaaatataatccgagtgcaccagtcccttgagatcctggacttcagccgaggtaagactatgtaggaaagcttcttgggctgattcatctccaaggtcatcctcctggttttggttcaaagaagccagaatattatttgactggccactcagctgctgctctggcttttggccaggagtggttgtgtctggagtaaccatgcatgaaaggaaggccaatcggtaagtcagatcacgtacgcccagagacttcaatccagagactccactaccaccgacctcgttgccccggaaggagttgttatcgcggacggcctcagggcgcacaccgggaagacccaattgactgacatcaggaacaacaatcaaggtgcctgtaaatacgcagcgttccccagccttggcgcgatcaaccatctcaccacgcaaaatgacatccattgtgcgtggcatactaccagtcgggatttcgtgcgatgattcctggagcttgactttttgccaatcgacaaatgtactttttccgatatccagacgccatcccacgcggttgccgcaggtcttattggggcaatccattggctccgtatatttgaaagtctgctcaacatttggaactactgtcttgcaaccttcgcagataaaagttcccagtgataattctggtctgacctctgaagttcttgtgacagttccagagacggaaagcaattttccgatctgattcgtccgaagctgtcgcagtctggaaaccaaaggtaggttataaaatgcaagggcaaacattttgtcggtttgctggtggcgagttttctcgcggatctgacgctcgaggtcgggattatctgaaactcccgcatatgctgaggcaaccgaggtgctggctcgcgaagaggcgctggcagtcattcggtgggagacgaagtattctggttcgtacttggcgatgagattgtgtagtcccttagtaaggaagggttggaaccgatagtattggctggcaatggcatctgccaagacgggattatggatgtgcgtgaaatcaacgtagagagttgacagctcgaattttttcatccccttaatctgagcgatataatacttgtcactaagaaactcccctgatgagggcggtgcagaagacgagggttcgtcgatgtatgactcgagcagctcttcaaatgcctgctgaactttctctgccgcctcatcgaccaccggcggcgccgcaggggcatatggattccgcatacggctgattgccgaacttcccgctccgacgacttggtcatctgggaaggcattcatatcactcatagggccattgctttccgagcgccgggagctgggcagattatcggagcggaggtttcgatcgcgagaaggcgcagagcccagctcggactggatcacggcgtcgaaaagggaagacatggcaatgagctgatggccttagaatggccaatgtaaagaagggtattaagcttccacgtgtgaggagaaaaagggaaatgtggagagatgatatcgtagactcagtttgctatcttagtttttcgtgggtctcgttcgcgggtctccttgggcaactagggcgcgacgcgaacgcgtattcggaagaacagttgatcctacaccgacgcgttaagtggtttcattatgtaagtatatacgctaacccatctaggcagtaggtccttcatcttcactacaaataacattgagtgtctgacctagtgtccccactaccgctcatatcaggcgtataaatgtcaagacccgtatttttcgaggtcatggcctgactgctggtttgaaacatgttcatacctatgagtgaagggcggacagaccagcatatacttggaaactgcaggtttggccggtttggcttgttggccagaattatttcgcagtcttaatatgagagttgtgaatttaagtgggtcacggtcatatatcctcggttgtcacttattgtgtggaagggagtatcccaaatccctacttcatattctggagtacaacgtaatatatatttgaaatgaaaaaaagttagttttggtgtcatcagagccaaaatagttgcagagaaagtaaagtcaggtcaataatgtaataccgttctgacgtgcatataaccattttaactaatactccgtaccccgtcttggaattaattaaatgccggtttatccattgggtaaatggttgatgcttggcgcttatataagagcttcttccccccggggtgcaagtcgagcatctgaaaccatcctattttttttccctccccgggaattatactcccctcgcattgtattgcctcgtaagttagactattctgtgctagcgtgctttccttcatgccctttcttccgcgcatattctccgtgaccgtctgacacttgtcatgacgtaggacttttgtgtcttgcgatggtttcttccaaatcccgagtccttggctggaggaatcttggtgactatcggtcggttatgcagttttgaccgttccattgtgtcgacaaaggaaatctttgttttcgcagctcgacatgtctgagaacgagcgacggttagtatcgacactgaccaggcccggcgctggcccaccgttgggcccgtctgacacggatgcatcgggtatgccccctctcgcctttacgagccaatctcccaactcgcatgcacaactcaactaaagcttctcgtatagcaccttctgcctctggccatggctcccaaactgccaaacccggaaggcgccgacgcgccgctgaatcgacgaacacacctcccaagaaccaacacttctactttgtcgatcagaactcgtcatccaaagaaaagcgtgctcatgttatgcgccaccatgtacaggaaaaaaggaaacagcgcaaaatgtcgcatagcacaacccccacagagcacatcccagattatatctcatatccggcgaagaaagaggcagaaactgctgaaaagactggattagagtcgcgctcgacagctgcgccaaacttcaccaatggggaaacttcggtacggaattcgctttcctctagtcaagtacttaggccacagccaaggctagactgtctaggtgtcggcttagcctgcaaagcatgatggatctagatgctaatgccatggtgtgtcacagcttcaaattcgattttcaaatatgaaaccgcaacctcatgctcctgcgctaccacccattggctcgccaatcacgatactcgatgcctcgcgaagggatccgttttctagtctcccaatggaatacgataatagcgatattgaattggctgactattggaggaacaagttgatgtactggtccggacaaaaccttcacttgaaaaaccagattttccggacggccatgggacaccctctttctttcaaggcagtagttctgtcatactgcgcgcggtggaaagcacagctgtacggcatgtccgacagcaccgaaatccagcgccatgttggtcaagccgcgaaaatcattgatgacattacctcaggctcggtgctagtcagagcggatgatcttgcaatggccttgggtggaatggccttacacgaagggcgcttcggcagcaaggaactggcccagatatatgtaaaccgcgcggtccaggtcatgcgaccgcgaacaggaagcaacaagcccgtggaggtgtttattcactacatccgatatctgatgatgccagaaggccccgatattagttttaccgaacagcaatggctgctcacttttttgcgaggagccgaagatctcatgcggcaacacagctcccccgaatacctcctcgaagcaccccatagactcacggctttccagatggaaggtcctctattttccctgctgtctagtgggccgcggccctcccaagtgccgcacgaatctcgtgtatatgtggttcgcgatgcgcatacccaagaggtcagccgaacggcggccctcatctatattacggccgcactgtgggatttccagaattccccaaataagaccgaccggttccttcagtttttaagtaccacgacaaaacagcaccacctcgatcgtgatccagcttgcgaaacccttttgtggttgctgctggaggaagcgcatgattctgatttacaagaccccgaacgcggatggtccactggcgagctggtcaaggcgcacaaacggctacggcctgacctccagttccagttcaacgagattctcatgagcttcttatcttttcagacacccattcgcggtgtcaatgcgtttgaagaggagcttcgaaatagtttacataattctcaatgaccaatttttattacttggattcgagtcaacgcagctactctgtagttacaattatgtcgacaatggaatgtcttggcagtacccgagtaccaggataagcctaagtgtcattgagttcaccgtagtggagatcaaggggaccttggaagctccgctgtttgccccggttccagttttccagacaatttgatattcttcgtagtgtatggatatattacgtaggaaaaaaaagtagctatgttgtacacttggcaaagaaagatcgggtagctgtggtgacgcgatacgccgactacatatgcatttggttagcgttgggtggatttgctgtggagatagttacctcggcgttacgcatgcgctcggaactctctacaacatactaattcatgaagacccaccgtgacttttgagatcgatcgtgatgcaatttgctgggctatggctctaacactacaatgtggtgtatatcattgcagtattggatcaatgcggggcccacgattcatatcgcaactaattctctcattatgggatgtattaatatggcgtaggaaatgctgcttttttgttatttgggggcgcagcggaggtttcaagttgtgagaatgtcaacccatcttagggctcgctaatttcacctacaacatggttactaatttcgacttgccaaggggtttcatgcaactctcggccccactgaacacagattcaggtcaataggggccaatagtgcaatccactatccagccttagcgctctctgtggcaaaaaatccccatctatacaagagtgattggatccagcgcaaatatgaaatgatcattcgacgatcgcttcatggcttatcgaattggcatgcaatgacacgaccgtaatgatattgatagtcgaaaagcagaaagaaagaaagcactaacccagaacaacctgcatgtgcatcgtttgggactctgatctgcggagacacattaatattactacggagtacatacccctggattctccaagggcaatagacaaattccctaaattccctatgacctttttccatttccgaatatgtgcgaccgaggattctgtacggggtacagagggcggagtatttccaagaagtttgttttatcccatagcatcccttacgcagttacatccctgctgtcatgatcgccatgtatgatcagctcatttatcttgaataactgtggctgtggctggggttctgtggcggacatctccggtccgaggctggaaaaattcaatctcggattaaaaaaagatcttacgaggtgattggatcaaagaatgggtcattgattacgacgaggggatctctgctcgcatctcgaccattgagcgaaaagtctggattgcccactcgccacccatggatggactgtcgctagatgtgagattaggttcgattcctgggaaaaaaaacaagaaaaatcacgattgaaaacacaaaataggaaagtagcccaaataacaaaaaacataatcaaagattgtccaattacgtagccagatcgcagatcctagtccttcccctccctgctggccatggatccctactaaactttaagcttctctcggtcttttccctcctatctttcatttttctttcacacttggggaacccatcctcccctcgacacttcacacccgtggattcgaagagtgttttggacattttgaatacacctttgcgaataccttcacaatggcccacgatgccgtgcactggctggccgccagggatacggtaagctctgtcgaacacctaggtagccggtcctttactcacgatactagagcgacgacccgcaggacaccacgccgacactatctggtctgctcaccaccctaatccctgctctcgtctccttcgttgtgatggtgttgctcttcatcatcctgcgcaagagcaatcgcaggatgtacatgccgcgaacctacattggatacctccgtccctggcagcgcacccccgattctccaaccggatcctggaactggatcaaggcgatgtaccagttacccgacacctacgtcttgcagcatcactcgatggacgcctacctcatgcttcgcttcctcaaactgtgctccgtgatgttgttcgtgggctgctgtatcactttcccgatcttgtggcccgtcaatgccacaggcggtggtggaaagatccaactgaaccttctgagcatctcaaatatcgacgagactcaatacggtcgttactatgcgcattgcttcctcgcctggatctatgtctccttcatcttcttcatgataactcgcgagcacctattttatatcaacctccgccaggcgtacctgttctcacccgccaacgcgagccgcatctcgtctcgcaccgttttgttcacagccgttacccaggacctcctgaataaggaaaagcttcgcaccatgtttggccgcgacaaggtcaagaatgtctggatcgcaaccgataccaaggagctcgaggagaaggtcaaggaccgcgatgctgctgcgatgaagctcgagggtgcggagaccaagctcattgtgcttgctaataagacgcgcagcaaggctcttaagaagaaaggctcggccgagaaccccgagactgacattggcgatggccagtttgatgatgagtctggctccgtcgctgctcgttgggtggaggctaagaaacgacccacacaccgtctcacgatgcttattggcaagaaggtcgacactatcaattgggcgcgttcggaaatcgagcgtctctctcccgaaatcgaggagttgcaggcccagcaccgtgctggagaaaccaagctggtctcctccgtttttgtcgagttctaccatcagtctgatgctcagtcttccttccagtctgtggctcacaacctccccctgcacatgagccctcgttacattggtttagaccctactcaggtcatctggtccaacctgcgcatcaagtggtgggaacgcctcggtcgctacgctgccaccatgagctttgtttgtgctatgatcatcttctgggctatccctactgcagttgttggtgccatctccaacattgactctttgaccaagatcgttcctttcctgaagttcattgacagcgttccgtcatggattaagggtgttattaccggtctcttgcccactgtcatgatggcagtccttctggcgctggtgcctatcatccttcgcctgatggctaagttcgggggtgcacctagtctaccagctgttgaactgaccgtccaaaactggttcttcgcatttcaagttgttcaggtcttcctagtggtgaccgttgcctcatcggccaccagtgtcgtcagtagtatcattgacaaaccctcgtcggccgcctcgctgctagcccagaagatccccaccgcgtccaacttttacatctcatatatcattctacaaggattgtctttcagcgccggtgctctacttcagattgtcggcctgattctgggcaagatcctcggcagattactggatagcacccctcgcaagatgtacacgcgttggtcaagcttggctggtctcggatggggcactgtctaccctgcattcacattgttgactgttgtcggtatgttacacgagtgatcgatttatttgtttatgacactaacgtttctcttagcgatcgtctactcttgcattgcaccgcttgtcatgggcttcggtaccattggtctatacctcttctatttcgcctaccggtacaacctgttgtacgtgtcgaactcaaccatcgacacccagggtagatgctacacccgtgctctgcagcagctcactgtcggctgctacctgtccatggtttgcctgattggtctgttcgccattggcaccggtgccaatacgatggctctcggtcccctgattctgatgatcatcttcttgatcttcgtcattctattccatctctctatgaacagcgccatggagcccctcctaaactaccttcccaagaacctcgaggcagaggaggagggtctgctcgccgctgagaaggccaacatcagtactctgaacgagaactccaagaccgatgacatgtccggtcccggtggctccatctcggcctcccgtgacagtggcgtcgccaacgtggacaacagcctcggcagcgtcgactccgccgagaagggtctcaccgagaagtcgccgccagcgcccaagccgaactttttgaccaagttcctgcgtccggacctgtaccataactaccaccagctgcgcaagttggttcccagctcctcggaaatccctacttaccctgctgaggtcgagcgtgacgcctactgccacccggccgtcagctcgcacccccctcttctctggattccccgcgaccctctcggagtcagcgcccaagaagtcgctcacacttctcgtgtcattcccatcacggacgaggatgcctatctcgatgagaactgcaagatccaatggaacgaggagaagggagagccccccatctacgaggagaaggttacctactaagcgccctctctacttgcgcgatctcgatctagttctctattagagtgtctagccgatgctctgtctcaccggccggcgaatgcaccgtgttcatatatcccttgtatacagacatgccatcgccgacctggtttcttctgtgatacccggccggctagtccacctgactggctggctataacccggccattttgttatatttgtcaatctaagattggtcttgagcttatgtaactcccggacctttcgcttttcttttctataatctcttaaaataatcaatttccacttcgcatgtcgataatctatgttttgagaaagttagccatggaattggaaatcttgaccatcctccactattctttttttttggattacttattgcatggtttttagccggccacttttggtcatggctgcaaatgatatggtcaattatctatctttttctctgattcctacgcagtcccttactctatttccaagtaaatattcttctttgtctgcatgtctacataccgaagtcatagcaaaccaaagtcttctattttgagcaatgcggtcattgcgcgatccgatagcagttcgtcgaactctcccagttcctatctcagttgttcggatgaaatgtgctatgcagtttcaccttgttgggctatagcgtatgtcttcgcggcgccttttggtcacacccatcggtccagatccaatgatataccgttggctggctaagtggccggtgtgagaaggggttctcaccctattctcacccagttctcactcagttctcaccttgctggctcgtcgttgctgctgcgatgcggttcggtacctccgctagatggggcgggccaccgtcgggcaccgataattggtagattcgcagcccctaaaacagttcaaggcagttgaagatgagctcgaagcacaacaatgcccgcagaaggctcgacttgatgccataaagcagtgcaccacactcgaaacaatgtcgtgctcgctgcctcgcggcgctcagtgcatgagagtataggggcacctgtcaccaccccgttctgcaacaatgctctctgggtacattgaagaactctgactggatggtttagaaacgccaaccttacaaacgagggagggacaatcgtctgcggccgaatcgacgtgggtatcgtatggaccgaatgcccaatctagctccttactagatacaactctgggagttcgttccgtgccttagtcggtgaaatctcctgtttgtaagaacaagcccatagaattgaggcggagaacgatagtacggaaatttccgattatacgttcatatagcggactcggcgtgcgcgactgtggttcgaacacctggcaaagttcaaggtctgtttcgatctggggtaaagagacgttgcggaatttcatgagcctagatattgcgatggtgggggtatgcgcgtcgatatcatgtagggagcgcgggcgaagtgttcttgcgttgggaggcacgataagatcgttcgactctcttagaaacggctggtaagatgcttgggataggagtatagttgcagtggtccttaagcctcctatcgtgtctgctgtattttgtggtctatgcgttgtgaagttgatgtatggacgcaggtagacgttgtcggtagctacaatgtagttaattgataactctgggcatgtaactaagttagttatagtttaaggttatataagtatctgactgcacataaaccaggcaagatggaaaaaggaagaatataacattcctatctaactaggtagtagtataagatattttaaataccctttcaggtatcctttcaaagatcttttcaaattgtcccttaagatgcctataaatatctatttggaatgatcagtggcatactgatgcacaattcctacaaaaaggctttctcatacatgataccaatatgatagacacagccagcacatcttatgggacctagactacccgttttgatcgaagcaatcatgatcctggtttcatcgtcggttcaggaattctttagatgaatctctcgtgacctattggccattcaacctttcatccgataatgtggaagttaaggttcgctggtttgccttgaaaacttaccacgttgaggtatatcggggtcatcatatttccataaatgcagcctctttgataggcaatttgcaacgactgcaccatcgagtgacatcagtgttctcgtcttcgtcgccgagtgtatcgaaactttcttcacaataaggtgtagacagtccgtgataatagcccgtcgcttgactcgtggggaagaggcgtggattagaatttaaatgccccacaggtgtattacgtagacacgtacgtacatctatgatagtccatactagtgtagagcacaatttagtgaattgcactgttctaaagtcaagacatcgctatcctaacatatagataccatctcaaatgtttatttttctcccatgtagaaaaataagtctttcatcaagatcaacagatcctgattctaaacctgattccaacatgacaatggagaatagtacctcgaccatgaaggagcataagaaaaaagaggcgggataaccacccgctagagcaaaaaccaaggaaatcacaaactaaaaaagaaaacgtaccaagaagagaaaagacatgcaacacaaaacagaaggaggccatcaagacatcacgttaaaggaaccaaaaaaaagtcacacacatcgaggttggatccgaagggtatcaaggggaagggaaacacattttgcgacaggacgaatggcaagaaatcggacaaaaaaagaacaaacagacatcatgcatacggacgaaagatcacagaaggatcaaatagttcgagggcgcaatgcctgtatctccattttgcttccgagcctgccaccatcggccgctcacatcagatacttccaagatctcgtgcttggcgaagctgatttcgttggcgtcttccgggttggcgtcatatgagtagatagccttggcgcggtaggggtagtctgttggctgaggcacttcgcccacttcttgctcgccgttaccgggagtctgagggttgggggtaccgaatcgaggcgcagaggaggttcgttcggcgccgggcgcaccgccagggtacccggagacaggggacgaggtctcgaagccgccaagttgggcggaggtgtacatctgcggggtattgctggttgccatggtatctgggcgggcgccgaatgcgctggacatggggcgactaccgcggtaggagggctcggcgggctgttccttgttcagggcgaaggagtcgatgaagccgcggtgagtggcctgcggtgtggagccgaagtagaagatccagacgatgatcatcatggaaagcaggatgaagcctgcgccagcggcttgcatggatggttggtttccgtagatcaggttgtttgcgctcgtagatgttaggacgaggccacaggcgaggtaaccgacgatctggagatattgtcagtactggaggctcgtgttatctgtattcaagagtcatcataccgccatgccataaacgtggcctgtgtccgtggcaaaggtcgtgacgaggcccacaataacacagaacatgtatgagatggcccaccatgagtagttaggatattcggttttcaaatcggcgatgatagatgcgatgagagcaataagccatgccagctagaactgtatgttagtcaatatcgggtcatagagaaagtcgaacgaacaattgaaatcgagacggtcatgagcgcgaacggatcgcctaggatgttgctaggccggaatttgcccattttggcggatttattggattgggcttgtgtaaagggaattgatatgagacgggcgaagaaaacgagggaatggcgatgagcgacgtgctttgtatataagagttgttgttgattgttgggtcctaaacgaggcggacgggaaggagtgactgtggttagttagtgtgggaacgacaggcgtgattgcatgggatgtggcaatgaattatgaatgcgacagtttataaaggaagcccgacatcatatggagtaggcagatataggattaaagtaccttgaaaccgaagtggattcagagacaatccgtggggatgaagaggttgggaaccgaaagaagggaccccttacagagaggcaaaaccagcaccaggctgggataaaatgaaagaaatgagagagggaatcaatgaagataaaagagtggataagattgaaggttgaaagagaggagagagaggagaatgatggaaaaggaggaaaagtggcagatacgctgtggagtccgggtcccccctggaaatcgacggtctcgattcttgaaattaaggaaattaagaaatttcaagggaacaagttgacttggcgggattataatcttataaggtacatgacaattaccttggtcgtttgaattactttatctcttttgattcatcgctaattataaaacaatgaaaatagacttgatctggtacaaatctataaatatccctaaatatcttagtcacctccgctttgtgcacggccatgctatgacttttatgactataattcgggacatctgaagtgtcagaaatatttcgtaagtccctatagaacattttcggtcttataggataacaactaacacattatacagcgacttcagttcgcaaggtggtcaagacgggtcagcctcatcttgtttttctgtgaagaattgcccggaccattttggtttctatactcatgaaatttcgaatactaactatactccgtacaagtacatacataccgagtccgcgttgatcgcatctgatcagcacgtgttagacatatggatgattatactatctaatctatacctacaccaaatctacagatgtctgcccgtagtacataacagataataagtatactgtaaggagtgtgttgttggtaccacactcgcgttcttttccgaatcgggacaaaccttaagaatgaataccaaatccgaaggatcataactatcaaataccaccctaaaagtcgcgagcttacgacaaattcttgctcagcctagatgaaccatggatcctagataaaatagagtccattgtatcaataaaaagtaggtttaaggtagaaaagaggcttagaagtttatccagggcccaggggacaaagcctaagactcttaagagttgctcgtgatccaaggctcattttgtcgttaagaagccacgtctgcataccttgaaaccatatctacacagtactgatggattatgttcctcgctcatgatcccacagatctattaagacagcagtatcgtcctcaggtcctagaattactgtttgctattatgccaattaaagaaggatgtagcctctggtagcggacaatatggtgagacaattgacaaattagagttctcttccgattagacacattagacgcaatttggaggccagcacaatgttattaatgccttgtaaagtctgaaaacaacatttgaagagcaaaaatagaataaaaaataagtgaggctgacccgtctcgaccagataaccttgcgaactggagtcgcacgcgctaccaattgcgccacagccccaagttggtgacatattttcgtgaagatttgccctatatttggcaccatgggagtcaaagatgtatctgactttttctcccccaaaagaaaaggaaaaaaggagaccgaccatagacattcacaacaatgataagtttgcagtatgcagtcaatagtgaataacaagagtagatgagtagatgagatatactccacaattattataaaaaaattggtactatagtgaaaaaaagaaaaaaaagaagatgaggctgacccgtctcgaccagataaccttgcgaactggagtcgcacgcgctaccaattgcgccacagccccaaattggtgacatatttgccgcgctgtggctttatgagcattggctctcttaactggatttaggcatgtatgattctgcgtatatacttcagcgctaatgacttgttcgtgttagccaaccaacgcacagcatcatatcattgatatacataggtaacccaatatcattgctaacaagtcaccagtcaatatacataccttttctgcatcaccaaccacagtttgcgggggaagaatccggggtagattatcacattccaattgaagtatggaatgaaggatatgatatacatgaacaagttttacatgtgatctaagctttacatatgccaactcggcttggccgagctggatatcatattccctcgtatccgcagatgtacttgaatatcaacgcacatacctatgtacgtgtgtgttgtagattgattaatccctctattttaaacttggaaatatcccatctgcgctattcaagctaaaagcacggtacgccaaaatcagaggtatcatagcaaaaagcagacaaccgaaacaaccagaggcatcacactcctccagctcctctccagaataacacccgaaacaagccatttcgacaagattcgcctctaaatttcctcctccctgccctgcctaacaacctctttcctcctaacctccctctcaacatcctcaagtctcccctcccattcagcccagcactccccactcccaacgagcccaacctcataccagcgctgcagcacgcgcgctgtgcgcacccgcagctccgagatctcagcagcctgctcactctgtgtctgcgcgagcctgtctaactgtggctgtaggtcgattagtgctgcggagctctgcgcgtccggcacggggaggtcatttagcgatgtaaggcgcgaggcggtttcggggaaggcggtggcgtaggagaggactattgaggctagggtttggtttgtgaggccttcggggatttggtgaggtggtgttgtttggaagagatctgggttgcggtcgtctaggtggtttgtgttagtatgaattggatggtttggagtggatatttcagaatccattatccaggtatcagaaatgcaattcaaatagcgagaagggtatgagatgaggggacggtgtagtggtgaagcgcgtgtaaataacattaacactggtcggtgacatacggagttgtagaacgtctcgtacggctgggacccttcgactaagccgttctaattctgattctagccgtacgagtcggcgggagactgtctcgtcgagagatgcgggcttttcgggcgtggtagggacgccggtccagtctgtggcgccggtgaggaggtaggcgaggcggcgtaggcgcgcctcgaggagttcgatggtggctccggccagtgcatcactttcgagggccatggcctatggaggtcaaagatcaatttggggaattgtgggaggaattaacagagaaagggtgcctgaagcttggtgaggtgcaaacatggcaaaatgtggggacaagcttatcagccgtagaaacctcctgaggtcgatgtagacttttttatgcaagactatgtctttttaatatgggtttcttcacacgagaccgatacttaggagttgaataggagttgagggtttattacaatctgatatttgacatatctcaagcttgacattgctctacagtatctacacattcatcactcactcattattcatgtgcttccttctccgcatgcttcattcaatctacttcgcatgcttaagatgatttgccatttcctcatcatcagcactgttccacgctaaatccacttgcgaggcagtgaacgccgtggagttatttgcagtggcaggatggcccaagagactcgctccatccttctcctgcatctcttggctgggctttggctcgtcgtcgaacgcggagacctcgtagtcaaaaacattcacctttgtggacttctctgacatttcaggctgctgttctttgggctgagtttccacgttgttcggctctgcccagggatcttcctggtcactaaagattatggtaggggtattctcgaattcgcccccataagcatcattgtccctgttcacgaagcccttttttcggttagccggggaccgcataacgatctgataacactagtgcatcttacctgaagctgtgacggcgcaggatccacttttgaattcactgcattctcgctcgcataaacaagtaagacagaactccactcttcacgagcggcttggaggacttcaatctcctgaactttccgaacagtgtagccaacaacctcgctatcctgtgtagctgcagtgttgccttgggcctttcgtttctcggcttgtcgtgtttttccatcttcccctgagaagctgatacgccaccactggtagtcattgttgttttcggtctccgagtccatatccatcaagtgtcccggagtagtcgttctaggacttgataaaacataagtcacatgcggttcagtgcatacacctcggagtgtatacttgtggaaaggaggctcggaaggtgatttgggaggttcgatgagtgtctttgatatctcacgaagagactccatggcactctgctttctaatttccagttctgtgctcatatgattagccaacagtatgagcacggcagaaacggctatcttcacctttgagtttagcttctatgttcgtagcgattgctctcaattcctctgcaactcgcattgtctctgcacctgccgctcctgaatcagactgatcagactcgcccacttgctcgggtgtaaccactggcaccgcctgggcagcttgttcgaggagttccgtgatcgtcgagttgcccacggggtcccgtggaattgtatagcgatgtatgagttgttcgagtttcaacacatctccctgtatctgttgtcgttttgcacggaattcacgggagagatctcggcagctgctaagataccgatctgggtagaacacagagtgaatatccacaccaacagcgtttggtttttgaagagcatcaagtctaatgactagcacgtctgctaagtgttcaagccatgtgtcatcaaattccttccccggtctgtcagaccataaagctgaatccaaaacgtcatagagcgtttgatcattgtcctgctcaacaggaggctcaaaagtgaagagttccctggtgatgggctcaacaaactcgtcgaaagtttctctcttgtatgcataggtcgtgaatatggttgtcagtggattttcaggatctgcctggatggctgcaccatgccacgcttccaaaaacctggtgacaatctcctccgaatcagccgataaggatgacatgctattgatttttgctaagctgtcgctgctgccaaaagcacgtttcgtggtatccataaaagccatcaagcgctgggtctcatgaatgatatcgtcccagtcgctatccccggtcttaccatcattcaccgtgacaatcttcggcaggttaattggttgcccgttccaccactgcggctcatggccgtagtcaaacagtggtttattccgtaagagcaatgcttctcgcgcgaggggaatactgtggagaatcgtcaagagtcctcctaggtaaaggccgtcggtgttggggcggatgaacgcaggctcgccctcgactcttttgcggtcttccggatctgggctaatcatgacttcttcggaggatgtgttgaatagggtcatcgcccaagcaccttcctcgtagtgatcccgagttgctttgttgaactgcggctgtctatgcgacgtcaccccggtttcctgctgccccatgtccgaatttaatgacatagcaactgcctgctgtaattctttttcttcgcgttctgccagactgagcccatgtccggaaccttctatatggtcaagtaaccgcaaattagtacacttcttgcagttgaagcgtgaagactgtgatacctttcggagcgatcgcgacagaatcttgatacccagcgttttgttccgagtcacgtatatctactctggaaggaggacgagtgggcggtgccgtcggtggcattggtggcgcattgtcttgttgagcaaaatcccatgctgaggcggggtatgttaattcccagtccgaagtcgcataagggaggttatcttacaagagcctccgttatcattccagtaactagttattggcttggcggtgtcagatcatagccaggagttgctgcgcgtcgccaagtttacctgtagctgagaccctgtcggatcttcgaagtacgcgttgatcgctttctgtgagtcgagattgtttgcctgtacgcgatagaattagctcgattttacttatcatcccgatggcagtcctctaccttcaagaaggcgatggcttgctcgcgtgtggtgcttgtgaagctgacgaagctggtgatagcttcctcggtcggttcggaggccatgttgttgttgtctagttctgcgctgaagctagacaccgatagaataatgaataagcatgagagggacacaaaaagcaaatagaacaaagcaaatggggacagaagagttggggaagagaaagacaaagtgtcgcaactgagcttccccaccacatgacgccaagcatcattccgctatttgcgtctctttgtacttctccttgtcctccctctgcctcgattcttcacttctttgagcctaaaatatacaggattggacattctcgaacatttcttgcattccatagcctgttccaggtttatcaaggcccatcggtcggactagttcacgttcacaatggatatatatatttttctggaactgattgtctccctttcaagtctttgaacggcctactctgggtcttacaccacaatactatttatggttgaaacaaaacaatgcattagtacaatagctcttgggctgtcggtccgagtggatataaaaacccctctattccgcgccagataatcattcattacactttaaacaacacatcatctttcactttcacaagctctcgaattttctcatactatatagttacaatggcctacgtaccccaaatcacaaataagaaagccaagaaggtcaagacagtcaatacccccaataccaccattaagaagaccaccaataggaagactgccaggaagagcgccaataggaagaccaccaaaaaggctcccaatcctcctgttgatcttaacaagcttttcccatcctggggctctgaagacgcactgaaccagacggcaaataaggaagctactgatatcattctagccgtgtaccatgacatcaatgcctactgcaacctcgagagacatgcgagaaacaaagtttacggttctcaagagacgttctacaacctgcttgtcttcacagaaggctttgtggagcgggaaatcggctactacacgtcctgcgtggaatcattcaaggcggaacacggtgagttccaacctgtcacacctaatagtagattcttagaattcgttactgggctcgggtggaagatgtttgctatcttttcccatgccgaagcattccgacggggtatcaaagaagccgacgataggacctgggggctcctgctcgagaagatccacgaaaactccatgagtattgaactttatgcgcacagtcgtaccctgaagtggcgtaatattcttcaggtctaccaggacaaccccatcccaggcctgccagatatgaaacccgaaatcgagacatacatgggatggaaagtcgaccaccctcatcacacggtcatcacgcttgatggcaagctaaaggaacccacatacaatggcaagttacagcaacacatcaacgagagtatctatgatcccaagaagtggagtggtcagaaacaggacccgacacttcgcaagaagcccaatggcagttcaaccaacgtcggacgcaactgtgttctatgcggtagccctgtttcttgtgactgccgcttgaaatctcgggcaggagaactggttgagcttagagaatacaccgagaagggtactggtgtccgagcgctggcgagattcgggcgcggtgatattctcgatatcttcatgggtgagctccttccccaccccgcagaggatgtttatcctctaacacaaagcgacgacaaattgaagttctccaatctgtgtacaatttgccctcaccagtttggcaactggactcgttatatcagccactcgtgccggccctcgacgcaattcatgactcgcaccattggaaaacgagttgtgtgcacggttgaagccattcgcgatattctgccattcgaagagattactgttagctatggcaataagtactgggagtctgtcggctataactgcctatgcggacactgcgatggttctgggactgactagaaatagattagccaactatatattctgcatcttagagttgagagctgattttaatagcaaagcattgaatagacccttgatttattttatttcaacgtattaatgtaggacacatgtagtgtccactctagtaccaaggtgatagggtgatgtagttcctcgggtatccccgcagttctgggggtgcggggaaagctatactttccgcggacttactccgccttttgcgtccttttctccctgctgttctaaatcccttcatttggagaagttgactactacctatcgcattgccctacacgactgatacagtcaatttcagccctcaagtagtcatgaaatcttggccaagctaacattggaataaaacatgagctacagcggaattatcacggggctgagccggagaggctgtacatcctgtcggaagtgtgtgcttggaggaaagagtgtccttcagcaagcatccttggtcaagagaggactgctgacggagagctatgcgcgggggccatcaggtgtaagtattctctatctaagaacaaggaaataacagtatttatctgaccgtattgctttcgatatagccgcccttgattgagtccacagttggggaccatttcgccaagattgtcgcggaatgcggagatagaacagcgtgagaaccgggacgcaaaattggagaattaagactggaaatattaactatactgtccagtgttatctcgagacaccaaaaagatcgagctacgtatgcctccttggacacaagaagcaatgccctcgcccgggggctggaatcactgggcgttgtgaagggggagcgggttggagtcatgcttgggaactcgattgaatacgctgtggtacgttgcgtgtccctaaaaatggttgagaagagaagaacaaggcttacatccgtgagcaggcaacatatgcgttattcaaacttggcgccgtcttggtaagtcagtccgctcattgtagtaagcgacattgtatctaatcatttgataggttccgctcaatccgtctttcaatactgcacaagtgattgcggccctaggtcacctaggatccggtcatcttctaatcagtacagagtccaacctgccccgaaaacaaccgcgcagtaatgttcccttgctcaacgacattgttgaagacctccacaagtcaaacctggagtccgcattggtcccttctctgaagaacatcattatggtcgataactctgaaggccgcgtggatatatcttcctataaaagcttgacgccgtatgcatctattgtgtcccagcttactgcagacggccgcccacttcctccccagaatctctcgccggatgaaactgtgaatatccagttcacgtcaggaaccacatcaatgcccaaggcagcatgccttacccatcgctcaattctaaataatggctctcagattggcgatcgcatgcttctcacgccgaatgatattgtctgttgcccaccaccgctgttccattgcttcggcggtatattaggctatatggcaacagcaacccacggctcagccatcgtcttccccagtgaatctttcaatgctcgggctgcactagaagctgttcaagaggagaaatgcaccgcgctgcacggtgtaccgacaatgttcctcgaggagttgagcatgatcgagatgggagaaatctccaaggagggattccagtatcttcgcacgggaatcgctgctggaagcagtattccttccgagatcatgaaaaaactacacaaggtattgaacctgaccgaattgacgatttgttatggaatgacggaaacaagccccgtctcggctatgacaacgacggatgatcccatcgataagcggatctactctgtcggaaaactcatgccacatgtcgaggcaaagattgtggaaccgatggacaagaaagagattctccccatagagacacggggtgagttggcagtaagcgggtacctgctgatgaaggaatactgggatgatccagaaaagaccgcgcaggtgatgataccagatgagtctggaaagttgtggatgcatgtgagtctaatcatctattatttgtctcaagtaatgcgaatttctctgaactgtgcttttagactggagatgaagcttccatgtcatcggatggatatatcactatcaccggacggatcaaagatctgattatccgcggtggcgagaatatacaccccctagagatcgagaattgcttgctagccaacgatagcgttgcagatgtgtctgtcgttggcgtccccgacgcgagatatggcgaggcagtggctgccttcgttattcctcgggaccacggcttaaaaacagtcactgctgaggatattcagcaatgggtacgtgagaagcttagcaaccatcttagtaagttataacccagaccttgggactgctgcatcctttccatcgtttgcagctggtcttcggtcatcctcaaaattgccatatagaccgagctgatgttttacttgcgtatagttccgaagtatgtcttctttttgggccctttggaacctttccctaagacagcaagtggaaaaatccaaaagttcaagctcagggagaaggccattgcacttttgactaagagcgctgcataaatagcgagcatacaaggccgaggcctgactttgcatagattctaatggatgagtgcctgatttctgtacatacttagttattcaagccttattagatagaattgtcgtatgatcaaggttaaattaagagcctgaatagatacattcatactgttgccagattaagattcaaagtagagtgttcgctctgaagtgaaccctggatcatcagaaatggacaacagacaagtaccaagtgcaagagccagtagttgaagcataaacctagaaatgttctcatggcaacatagagttttccgcgatggtgtcggtgtgagtacctgctttctttcaggatatcaagtcgtggtagccagtggccatcgcggacactttcagacctgccacatcttaatgacgaacacgaagctgtcgatggggtaggtagctcgaaagcagtatcaaatccctcttctgtggctttcaagggcgggtcgtttcagagatagcgcagtgatgtcagtcagaccagcacgagtaacatgtataacatatcatgtagccagtgagcaagcttgctgtagcacacatctccagggcacgtgcaacgaggtttctctaaatctagaaatcctgaatgcctgtttctccctggagatttgggcgagcgccgtcctcgcaagtgccgtcaaccacccattcaggctcctcatcctcgaaatactggtcttgctcatccgagtgatcatcatagtcgtcattttgatcaacggtctcgtaatcgaaatcagagtcattaccctgcatgaaacgcaatcccatctcccagcgccagagccgctcgccttcctccttatttgggggtatttcatcacggtcctcagcaaggatctccccatctgggccgcgagtataggtcatcatagcgttagggtctgggtttgatatcgcgtccatcttggcttcagatcgcaggagatcagtctccaggacgcctgaaaaccccttggctcgcccctcggcctctctttcttgtgctgtctggaaccggcggatgaggcgatcgtataataacgggtctgcggagaagtcgattaggattagcattgtgttttcttgttcgctcctgtatgcaaagccagctggcaccagtaataaaccaggccagataatttgtaaaatgattaactggcaatgggagagaagagatcaggcggaccggctagctcaagccccgccgagaagtattctgggtgcaagtccagataccgcttgcgacggtttttgactgtgacagctttttgtgcgctagacgcatctttggccgtaaacccagaatccttggggaaatgtggcatctttggtgtgtttcagagtgtggagatggataggagaggagaatggaagttgggaacgcggagctcagcggcaaaagtgccttcacctccgcaataacttttttctcgttgaagaatattttgagatgtatctgctttgaacgtgtaagttggggatctcattcaaaataccttttcattattctatggatgtttttttggcaataagggggaaaggacacagtttcaggttgctaacaagcctgcagatgcgctttctaggttgatttcccgtatatccagaactgcatcagctggaaataatgtccccccaggacatgttgcggcacattgatgcccggcggttcactaccggtgtggttttgctgatcctgcttgccttctactcgcccctttcgaagcttgtcttgtctccaacatatggatccttccccgcgcatatcttccataattttggagtggccatctccggcggaatcgggtggctactgaaggacaagattctcaagcgcatgggccgtctaggtggctttatgctccctgtgttggcattctgggttccgactctccagtactttatcaagcagcaaagctctaagattggcaaccccacaggcccagtggtcacagaactttgtggttactaccctctggtgctgttgaccgtcgcctatgccggaaagcaaatccagactgctttgagactcgaagcgcagggcgacgtgatagttgagcatgtgcccctgataggtacatatatattctattcggctggcgaccacattgcccaatatgttctttcatggattgttgggacctcggttattttcaccagagttggcatgcaaatgcttctcgcggcctgttactctgtgctcatcccatcaaaatggctagtcctggccattccctctatcattttctcagtgacttcgaacgtacatttcgctggaattagtggtgtcaattccgcgattgagcacgaaggttattctcttttggcacgacaggaagcttacactgggtacatttctgttttggaaaaccacaatgaaggattccgagttatgcgctgtgaccacagtctgcttggtggacagtggaccaagctggcaccaggctaccgacctgaggtggatgaccctatctacgcagtctttgccatgctcgaggctgtccgtctggttgagccggataatggcgtttcccgcgttgacgcagacagcaaggcgttagtcatgtaagaattatgcaaaaaggatcgatcgcccagtttactgacagaaaatagcggtcttggagtcggcacaacaccctctgcgctcatcaaacacggcattgaaactaccatcgtcgaaatcgaccctgtggtgcacaagttcgccactcaatatttcaacctcccgccaaaccacatctccgtgattgaagatgccgtaaaattcgtcaagaaggcacagtcctccccgaatacaccccaatatgactacatcgtccatgatgtattcactggaggcgccgagcccgccgatctcttcacatacgagttcctgtcaggccttcactcgctcctcaaggaagacggtgccattgccattgtgagtttcatcaaggcaacaagccccccaaatcaactccagactaatgaatggaacacagaactacgccggtgatgtggccctctacccaaccggtctcgtcgtccgcaccatcaatgccgttttcccatcttgccgcatcttccgcgaagaacccactggagatgacgaagataccgacttcaccaacctggtccttttctgcaagaagagctctaacacaccgattcaattccgtgaccctgtcccggctgacttcctgcgcagcaagtctcgtgaaagctaccttgttcccaagcacgaactcgaccctgccatctttgcctcttggcccaagggcggtagaccaattttgattgctaagcaggccggaagattgcacaagtaccaggatcgcagtgcgatcaagcactggtctatcatgcgcaaggttatgcctgatgccgtgtgggagaactggtgagtgttgaaagggagctgagtaaaattcgaagatcgaatattactcttgctctgacttttatattgtctgtctatattagaagatcataggtaccaaataatagcaaactagcctacaaaaacatcgccttttagatctactgaaaggtacatacttgctgtttcgtccttcgtattgctggaaagacacgtagaataacaaatcacagacttcatattggtatcattatctaacacctgccgacaagccagggagctccatccactgttagagtaagcaacagagcaactgtctccccttcacaaattcaaaggtcccccaagagctctttcatctccatatatcaaaccacccagcccatcaccaacagtgagagttccggcctctgtattatgtacgcacaaagaactaaaatacagtgagaaagaataaatcaagccgaaggactgccacggggactggagccaggtttcttgacgaggccggcgaagaagttcgccagggcttggttgtgcgctttctcgtcattgccagcggtgcctgcatatgggctctctttctttagggttcgactagcctcgcggtcctggggtaaaatttagctatgtcctgggttggggtgatgatgccgcgctggacgggtgcttacccgaagctttttcaacatatcatcggcgtccacttggattccgcccatgttgaactgtacagggccgatgtggtcgttgactttgccttcgtcggccatgggagacatctccagttgcggggttggctggtttgaattctccttctcatccttggctttgagatcctccagtttctccacttgggttgcgaagaattcttggaggtcggtggtctcgacttcgatcttggtcgtgttgccgtgggggttggatgtgcctcgtttagggtcattgatggtcagttcgaacatggtcactgcacttgtgccttcttctgctacgccgttctcgccctgctggttgtcgtctgtggattggtagattgactcgggagactcctgaatctcaattgaccacgccgtcgatactccctccatgtcaaatccttcccgaataattcggatcttaccccatgagtcccagttggctggcactagaatcttgtctcggtcgatcacattatgctttaatgattctcttttcaaaagagagtgtatacccagagaagaatgaatcaagccctgaagagagtttgcaaggaatggggtagtatagatgagcgacgcgccgtctgtctagaggtcagaaagagcacaaatggccaaacacaggataataacatccttacgcttcaagagaatcgttctgaggaattggagaacgaaatcgaactgctcttcgtgccatccgtgatctttctctaatttctcgattttatccgcctgagaacgtcgcgaagtaaagtcagcaaagatttaccagcaattgatctctggataagagtttacataccccttggcagacaacacacattgggattccgaggccctcatcccattcaccgggtcctagaggtattgtgaccggaccgcttgaggttgaaatgccgcctgcagccgcagagctgggatcaattccccttttgcgatcgcgccattccgtcatggtctcttccataacgaatttggtttcatcgtcaagcgaaacgagcacagaacgtagcagacgggtccattctcttagcctgcgaacccacgtccatgggtctgaccagtccatcagaatgacaaccagcgtttccgggacggacttgggggtcaaaagtggtttgaggagaggtgcgaatgacggagagggctcggacaagaggtacgccgagacgcgtgccagggtatctgcgcgagagaagcatcagcatatgcctgatcaaagagtgcattctccgtgtaccttctttatcagcatcgaggacatctcgatatgtgtatccaagcgcaaattgattggcaattggtggtgttttccctttacctttccgcttgtcgtttactaagctagggtctgcagaggtgtccgcggaaaaagtatctagaaattccctctggctgtccggcgtgccacctatgatcgagctattagcgacgggtccaagatgaaagacgagactagaaatgaagatgagcggcactggaaagctcggatgaactggtactaacctagcactagcaagttcttctcgggtaagcgcttgccgttggcaacagtatctaatagagaggaccaaatgttcttcttggagccatctttgctggttggccgactgctcgtcttcccgggattcggactggaaggcatcgtgtcaagtcccaccgtgcctcaaagggcattcacccttccaaatgtctgtctctaccgtagtacagcggaaatattgttcgcgtggaaatgtggaggcggagggcttgtaaggcgaagcagcgttgcgggtcaggggaatcccgagggagatggataaatgtaggcccaagtgaaacaaccctaatcgcgaagggatctccgattgcaagtcacaaaaaaagaggaaggtctttttctggcacgtcgttgagcagggggctagtttgcattgtaaaggtgcgtctccgtaaacaattgattattacggttcagcgcgggctccacatttctttctctccaacttctgccacaccttgaactattctcccgcgcacatttccctccatgaattctattcgccaggtccaggcgctcaataagcgcgagcttgagcacgcgatgtaagtagaactcatgtgaagctcccgcaaagctctttttcccactgacagtcttacgttccacctatagacccccagaggcatcatggcatgcagattatcgcgacacagcctatatctacatcggaggacttccatttgatctatccgaaggtgacataattgcgattttctcacagtatggggaaccggtgcatgtcaacctagtccgcgacaaggaaacaggcaagagcaagggatttgcctttctgaaatatgaggaccagcgcagcacagatcttgctgtggataacctcggtggcgcaactgtcatgggccgtttgcttcgagtggatcatgcgcgctacaagcggaaggacgacgaggaagagcaggacaatgtcgccaagctaatgggagatcccggcgtcagtgagaacaagagcaaggaggacgaccggaggaggggaaccgcaatagaagagaggcgacctatgctgaaagaggaaagggaactggaagaattgattcggaaccacgacgaggaagacccgatgaaggaattcctcattgaggagaagaaagaagagatcgccactgcaatccagctgtggaacagcaccaagaagtcgtctcgacgacgcgatgacagcagagaacgatcaagccggcatcaccgccgacaccgttctcgttctcctcgcgagcgaagacatagagatgatcgctctatggatagggagcggcgatctcgccgtaggtcatccgaaagaggagaaaaatctaaaagggaccgctcgccgaggaaatcgcgctcgcccgaaccccgaagacaccggagtgatcgggatagacatgatcgccgccattgaaagataaatgagaaatcgttataaaggtttccaacgttatctacggtgctacacatatttctcgccgaaattctctccttgcaaattgggacaccctgaccaaataagagcgtttcccagtccagaaagcgatgccatgattcaagcttgatgctggcaaagagctaggtgctgcagacaaggtgttcgttacttgctggacgatagactacacccttggtgtgacagaccggggattttccttttgtcaacccagataccttttccagccatcccgcagacaatacctctttccttcctcgccatctcgaagcacaaatttctcccagcgcccttcttttccagatccgactaccaacagagtctggtcatcgcaccagcctatgaggcctttttgaggccgaccaaatgatgacccgatcggtggcacatgcgccgagccctggttggcttgctcaccaatctcaaaatgtgcgttggcaaatgaataaacatccgagaacacacgaggaagcaggggaatcttgccaaggattccccatttgtagctaggaggtgtttcctctaatgctggtgatggtgattgactgcgacgagtaacggattgctggtgggggatatcaaagatgtggagagtcgatttgtcagatgtaactgccagcaaagtattggacggcgaaaaggcaattgagaatatcactgcgtggtcaacaccgcgtcgcaattctgctagcttcgtgcaatttcctgtagcgaatatacgaaccaaagtcccctggatagatgttaataacccacccatagatgatcgcagcctaagataacttacggactcacttgcagtcgccagcaagttcccatcgggacttagggccatagcccgcaatggtgtgctatgtgcaggtatgatgctgatgttgccggtctccagctctatcatttggacctggccgggagaccgaccagggaaggccagcaccttgttatcgagacaggctagccccaaagggttatcggaggtttcaaagactgagagtttctggggagggttggagaatgcaaagacatggacgctgttcaataaaacagcgacgatttttgttttggagagacggacaccgagcacggaggtgcggaattcaagtgtgatggcggctttctgtttggcatcgtcccatataaccaactggggatatctgtgagcttagatgctcacattatgctagggataattgcctaccttattctgtgggaacttggggttctttccaccaccgacaatggccaagtagttcgactgaccaagcatttccgctatcccgatgcctgcgttgaagtcttaagtgcaaataagcgagtcaaggtaagtgacttgatattttgtatattcacaacgtgtagatcaatcgcttacctctcaaaaccttgagctcgcaagggttggcgttatatactgttcgggtcgttcatcagcctgggttccatagttcataatatgagctagcttctccctaggttctcctaatagctagatcaagcgttcctcaccacaaaaacccgtgtccaagcccactgagaagcagctgttatcatgattaaatgttgctgagagtgaatatggcccggtggactcatcgatagattggcgggtattcattgctgtatgtcaacgaagcataggaaataatttcttgatcagatagatcgatctgggtagactctgtatagtaaagtcctcaatcggtaataaatagttgatcttaagaatttttccaggttcaaagcttcaaatgcttggatgtctgagatcatccccgagcttcttaatcgataagagcaatgcgggcaagatccacatcgacgcctcaggctgtggattatgtaatcatacggttgccagcagagacccactttgatcaacccctgagttgctgttcgatgtgttgctgatgggaatgaaggcgatgttgtaaatggaaatagggggaatactcggtagataattgtcaatttcctgaattcttttttttcttttttcatccactcatcaattgtgactgatcgaaagctttgtagaagtaaaaagtagctggagaagaagagctgtcccgtgattggccacctatttgggaaagggggaaacacgaactgtctttcctccccccccctactctctccagactctcaggagaggcaagtttcaaacccttcgtcttcgttgttaattccttgctttggacttctttctcccgctacacttctttaatcttccctttactcacaatgtcgtcagccctcaatgcggtatgtacattccccttttattgggagcttcccgccttctcttaaagcttcccaagctaattgcatgcccgtacttgttccgggtagatcaagattcgtcgcaagaagaatgtcaagaagggtattcaattctgtttgatggtgtgcggcgccagtggaacaggtatgcttacaacggattactcgaatttcagggactaaccggatcctcttttccgcgacaggtcgcacaacttttgtcaacactctctgcggcaagcaggtcctagagggcaaggatgccgatgatgctgccaatgctcaccttgaggaaggtgtacgcatcaagcccgtgacggtcggtcagttgaaattgtcccccgcgcacggcgcttatatcaagctatcaatactgataccggatggcagagctcgagttggacgaggaaggaacccgcatctccctgaccatcgtcgatacccccggattcggtgaccagattgacaacgaggctaggcatgcacacacagatacccgacagatgttcatggactgacttttggatagcttcggcgaaattgtcggttaccttgagcgccaatacgatgatattcttgcagaggagtcgcgaattaagcgtaaccctcgattcagggataaccgagtacacgttctgctctacttcatcacacccaccggccacggtctgcgtgaactcgatatcgaattgatgaagcgcctgtctccccgtgttaacgtcattcctgtcattggaaaggccgactcgctcacccccgccgaattggccgagtccaagaagctgatcatggaggacatcgaacactaccgcattcccgtctacaacttcccctacgacgtcgaggaggatgacgaggacactgtggaggagaacgccgagctccgtggactgatgcccttcgctatagtcggatcggaagactttgttgagattgacaaccggaaagtgcgcgcgcgccagtacccatggggtgtcgttgaggttgagaaccctcgccactcagacttcctggctgtccgtagcgctctgctccacagccacttggctgatttgaaggagatcacgcacgacttcctctatgagaactaccgtactgagaagctcagcaagagcgtcgatggtggctctgggtatgtttctccttatactagaaattttattataatccatcggctaacaaatgaacgaacagtggctatgattctgctatgaaccccgaggatcttgcctcccagtctcaccgtctcaaggaagagcagctccgccgcgaggaggagaagctccgtgagattgagatcaaggtacagcgtgagattgccgagaagcgacaggagttgttggctcgcgagagccagctccgagagatcgaggctcgcatgcagcgcgagcagcaaagccagaacaatgccagcgaagcagccaacggagaggcctagatataccctgtcgacgatgcggctcattcgacggggcgccggttcgcaatgtgatactctaccagcatggacttttatggcaccaacaagttggcttttgtttatgggataatattgactgtttattcatgttaatggcttttttcttcttttcttcttacctctgcggggatgggcaacctcaactagattacggcactccagtcacgaattgtgggcgcaatgcttctcatttccaatgggagtctgaactatgtcgagttgggaatggttcttaccagttcctggaaaccctatgctcgatatatctcctcgcattcaatctggtgactgcctcttctctagcacatgttttccgccgtgtctaggtcgtcccatcttttttttcatttcatcacatcccagccgccaccgtgccatgttgccgcgtcatttctatttcctcctcttctgcttcctctcctgttcttgtccaaagtcgcagcgcagcaatattccctcttctcttgtttttttttcgcgttcgtgacttcttgttcattatctatttttttctcctcgcctgtcttcctaccccgatagtaattgaggaagaaaaagtacctggctagctcgcttgctctcaatttcttgttcagctactgtagccggtcactgcgtactatctgtagcagcatgctttagtttgtgatattacagctaagccgtcaaagtatttacatagcttgaagatagtatgttaggcttgcttgacccttctgtggcgacaggagatgtccagtttagggcctcactagcaaggcggttaagctctgcatagttaatcatttgaagatctggtcataccatggacggattaatgtgagccaatcataaagctcccaacaactagcaaataggtatgggggcggtaagacggctatatagtattgaggcttgaaatttcgttgctttgtgtggattattttcattatgactaggataggaaagttgtaaaacgaccgtgaaacaagatcaaatatccatgattggaattaatcacattataataccaagcttaggtctactgcaattatcctcatctgaaatgcaatagtgccattcacatcaatgagattgttaagtataacagacaaagatgcctcaaacccaaaacgatacaagtagaacgaagatgtcttaaagaacatttggaaggaaacaaagagagccatcgggagatagaaagagctaaagaagaaaggtaaaaaattttagaaagaagaaaaaaaaggagccaatgcaatagcaagaactgaaaagaaaagaaacgcagcaaaaagcaagaaagcagacacgcaagaagtggtatttgcgctccattgtacattgcgtagaaaagacggggaaacccccatttgttgtaattggtgttgaggaaagggagagataggtgtttgcgaagtagatgtggatgatcggtcagttgcagagacaacacagtacatacagccacggctttgcgagtatgatgagatgacacatgtagtgaaggacgggtgtcattaagaactttcggaagataagtgcttaatgatctgtggaaagagatgcgggcgacaacgtcaaagcggcgatgtcaagcaggggctgattgtggtatgtacccgttgaacattaggcggcggctggctgcggcttgttcgtccagaaatctaaactggcaacagtgtcatagcctcggtcatcttcataggcgtagataatctaccagatttagtcagcgcttgatcagtgaaaaagaactcccagagaaaaaccccgggaagaaaaatatggaagtaacatacctcgcgggtggaactgtgtaacatgcgaatgttcttgccggtcataaggtgtgtcaattcacttgtttcaacgtgtcgaatttcgacaaagttaggttcgaacgccagaatgtaagggtaggacagtgcgaatgcgttcgggttgccctcccaggcgatcttccagtccggacgagctcgccacccattgcggttgacgaagaatgagaaatcactgtagttgagtaggaactcgccattcatacgctcaatatgaataggtttgacattctcctttcgtgccacgaagtcaagagacgtgtcggcctggtcaaggagagattgggtctctgttgtttctagactgaccacctcaaagccacgtgcacaaccaacacatagagtagaacgcaggaagtggatggaagaagactcggcagggatatagtattccttagtgaaagtgttagtgcgaagtgaagcatgaacatggaagagagaaatacgaaccttgaatggcttgagagtatcctgaccaccctggaacattttgctgacagcagacttcttctttccctttgccagattgtccatcggctcgtagaccttgattgtacttgatagcgccgatgttttgactgaacaaacaagatgacgacccagaccaatgcctgccttgaaaaagttcgcatggccctgaattttcttcggccgttttgccatgctgttctggccctcgacataatcgagagcatccatgggataagaggaaagcgttttgtttgccagaaccaatagcagctggtactcttctaaagtgtctatttgagtgacttgcgtagcctctagaacctttcttggtttggctgttttgtctttaggccagcgttctgagacaaatatgccattatcagtcccgtagactaacttccggcctccatctggtggcagttagtgagtgacacgagttgaattagaacttttttgacgtaccaatcggaacaagacaattgattcggttgaccgctgcgaaaaagccctcgctcaggatcgtcttgttgtagaaattgctgttccgctcccacagtttgtgttgttgctgttctaccgcttcgataaactttcgtcgcgtggcgacgtttgtggcatagagagtctgctcgtaaccacccttgccgagatgcctgaaagtgataggcagtccaccatctttggcaggagggggattgttgatgacagtcttgtttgacaggagactggatgaaggtcttttggcaatccctagtcgtgggatgacctcttccatctgagcgattactaacagttctaaaggaatgggcttcctataaactcgagattcctcgcgtttattcaccattttgacgcgaacgagcaggacggcatgatcaaagagatacgcggtaacatcggagctgtcggctgtggttttcttaaatgacatcttcatgagcatttgtcgattttcttctgtgagcttcaaatcaacatagtccgcagagttgaacttcagcgcagcgttcaattggaccaaattgaaatggttctccgcttttccactttcagtattgacgcgcgaaaggaagtccttgatcagcttgatggccttcggaatatcttctttgtcggggttgccatccgcactgtttttgtaaacaccttcaagcaaaagcgggtatcttgcaagacgagttgtaggcttcgtcaaataaccgttcagttccagcttccgggattccttgagacgttccgtgtcttcgacaaatttcgcaaaggctgggttcgatgatttctccttctcaaactcatactttccgtatagttggttggcaccatatttgatgaaagggtcgaaattagggacatgttgacagaagatgtcgccaatggtgtgaacgacctggctctccttctgtcgagcattcagggcttcacatagagcgctgttgaccttgaggacctctaagcagttgccaaacacggttcgaataaacttctcacgccggtgttctggaattggcgagtgagtggtagttccagcagcgcgcaatggtcgcatccagaaatcccgcaaatattctaaatccttgacgaaatcacgctcggtgtacatgagctcaaagataacctcctgccttttcttctcgtggtcatcaaccgagtccgagacctccttgggcaccgtactaatccacagcttttggttatcattgtcgtcatcatcatccgggggtagagcagtcttggattccgatgttcccagtaccggctgaggtttcagattcaacctggcttgctgctccagtcgtcgcggacaagcaatagaatagcagagagtgtcccggttgcaagtgggagaataacattcagtcaggagagtgaaaactccgttaacctcgatcgtcgacttgtcttctcccattgtttccttgaactgatagacctctccgggtgcgtcgcgaagacggtggtcatatgtgacatcgtggaagaatttctgagcatccagcgcacggccgagcaagagagcgaggttgcgatcattggttctgataatagaagctatcaagtccaccgaatcagtacccgaaaacgcattttgatacgaaaggccgttcttctgtcgttcgccgagtgaaatcttctccctgaaaatctcagcaacaagagaaagcagagcaggatataccaccggaacctttcgctgcgaatccctagaaactagggtaaccttgccgccggagccctgtgtggcttggctttgaacgctcattgtccgatcgggcgcaacagtggatgccatagacatagtccgagatctctgcgatccatcgcttggctgacgagatgcaacaaattcatcgggactgggctgcatcgagtcatgccttattggaatctgctgatcgtgacttgacggaggtctgcggtgtggaattgaccttccgctgttcatgatatgcggatcccgatcagatgaccaggaagtcatagacatagctcgttcgttcccatgcttttctgggacaggacggccgagctgcgtgacctgagctccagcatgatactgttcacgacgagaagcagtggcagacgtgtgattgaagttgcttggcggaatctggtaaggcggcccgcttagttttgccattgaccttgaccgggatgaatcggaattcagcgcgggaggaggcatagcacgattgaaatccctagagtctaggtattgcggagcagggctcggtcttgactcgaggcgttgaggtcgaggataggcagcaaagcgttgttgggtgctagggttgtgtcgaggaggctgatgtgaagacattgttgccgaggcccctggactgtaggcctgatacagcccggacggctggggtggaggatatccatttggtggtgccgacggcggtccgtgtccatttggcatttgccgtgttggcggcggcggcggtctctgaaattggggttgtgcgacatgcgatgacatggtgtgagcgcgaccctgggcgaattgcggagtctgtgaattcattgtatgggaccgtcctgcaggcggtgcgcctccaaatatgtcagaatacgctgcatcccgctgcgtagacgaggcgggtccgtgaggccggtaattccggctacgctggccccccaaatccgccattttcgcgaaatatcagcgatcaaggatgagtggcggttgtttaatcagatacgcaaggtatatctatgccggggtgcgaagaaggcgaaaggggtatccgggttgatcgtggagagcgttcagggcgtcgcaataggtctgttcaagatcgtagaccacgggagaaacgatagaggtggaacgggagagaaaatttccgtaggcaataacctcgaaagaaataatagattgtctcaaagcactgatgggactcaatattccataactcccctcagttcggatggggaattcaaaggcgatatcaaagcggtactaatggaaaagcgccaggagccgtgagcgcaactaagtcagggctcctttcgatttcatgccctcagcatcctccgagatttgaggtcaggagtgagagtagaggagttgttgaaggtgggggtgataattggatgttgaaaatgcagtaataaactgggggagggggggggagggacccaggagaacgaggatggcgaaggtgacggcgaggccggtatggtaatttcagtacacagactcctaatctgccgttcatagggcttttaggagtgacatctgaaatacagtgggtatggtatcgtcaccgcccatgaccagacaatggcgtggactacggcgggcgaagtggccatgtggaacacccaaaaccccgacacctccagccgtcaacagcccgaacttctccctgcgcttgatcttgtatcaaacaggacccattttcttcttatatttcccccgtgtaatttgcaagattagtcttgccccaccatcactatggcagacagcgagcttgcgcccaagtttgctccgttcttctccttcgtgagttcaaggttccgcgaccactggggttcatagactaacaggcttcctatactaggcaggcattgccgctgcagtgggttcattccaacctggttccgactagacaatacactaacagttccctatagatgatcttcggttgtacgtgaaatacctctcatggatggagctagctctccaaggatataacgatgaaggcattggcagtcgctggggcggttaagaacctccttaaggacgtcagggaagtccttacacttataatggatagcatatcatcgctagagaaatcgtggtaccgtgagaggccacagtgggctatgaaccggttacaatggttcttatcggtgcagtggttcccatggggcctgttgcaacacttgagggccctcttacggtactgcgatatctctggcgatgacaatgacatcatttataagcgtaaggacttccttgacgtccttaagggggttcttaaacgcgccggcgactgccgatgccttcagttatatctatgttctaggtatttggacaaacagcttacaatctcacagcggcaggagcagcttatggcacagcgaagtctggcattggaattgcaggtgtgggaacctacagggccgatctcatcatgaaggtaagaaccgtttctctaggttccgtgatggacaggacggtagctaactgagttcatgactgcagtccctcattcccgttgttatgtccggtatcattgcagtttacggtctcgttatcgccgtccttatcgctggagcaatgggaccaggaagcaatgagagcttgtacacgtacgtttcgaaagttgggtggatgtggagcttggcacaagctaatgatgcacagaggcttcatgcatcttgccgctggaatgtcagttggtcttacgggtgtggcggctggttatacaattggagttgtgggcgatgcagtaaggaccctatatgcgcggcaacgtgagaggactattaagtcctaacaactactctagggtgttcgggcatacatgcagcagtctcgggtctacgtgggaatgattctcatactgattttcggcgaagttcttgggctttatgggtatgtttctgagtcggggttctttcagattacctttactaacatggtcagcttgattgttggtttgattctaaactcgaagtcttgagcgctgggcaattccatacgccgactcattcaacaacactttttcgtctgctaccggtcatcctgggctcgaacagacaccatttttgatatatgtgtaccaacaacgtaaccaggacagataatggccatggaaactggatcgagatatggaccgactggtttctgaatcgaatacattcttatttccggtgtacaataaaaggatcttacataggttcgggtcaaatcaaagctaagagcttactcagtccggtttatcaccgtagtttctttcccgtccagccccgcctcccatagcaaatacgtcagagaactttcattcttacaactctttgccccgcgatttttccgaaaccctagattctttcaaaccttcgaacctcgatgttctttatgatctgaaatccggaatcgagctgtgttgccgattggtggcgcgctaacggggtctccatacacgtttttttcccttttaccacgacatgatctttgaccattctaatggcaaccggagcagtgcaacattcgcctaatgaggcgccaggaaccatggtatttcccaaggtaaatggaaacctgcatcacagggacaagcaactcgtcgagtctttccgtcctcctccgcgatcctcgaacccatttctcatcaccgagcgccaggacgagaagcaactgtgcatctcgtcaaggagtctgcgcgtgagcgattttgtgctcgtcaagactcttggaactggttagcgcgtggccgaacccatatttctcttacaggagtcgcatctgacggttcatgcttttctcattgtataggcactttcgctcgggtgtggctcgcaaggttaaaagaccaaaaggacaagagcaaagtatatgcgttgaaaattcttcgaaaggcggacggtaagcgccactttgtctaacgttgtgcgtggcgagggacaacttgtgctgattgcgactggaaagtgatcaaactcaagcaagtggaacatgtgcgcaacgagcggaaggccctcgcagcggtcattgaccaccctttcatcaccaccttgattgcatcattctcggatgagaaatgcctctatatgctggtatggcaacttgtttttttggaatacgaaatatgtcttgattgatcacaggatgctgacgaattgtcagctggactattgtcctggaggtgaaatattcacatatctacgacgacaacgacgctttagcgaagaagtctcgactatctatgccgccgaaataacaatgacaatcgagttcttgcacgatgtacatggaattgcctaccgagatctcaaaccggagaatatcctgttggatgccgatggtcacctcaagcttgttgacttcgggtttgcgaagcaagtcgataatcgcgagacatacacattatgtggcacaccggaatacctagctccggaggtcattcaaaacagcggccatggacttgcagtggactggtgggctcttgggatcttgatctacgaattcttggtcggacagcctcctttctgggaccagaaccctatgcgcatctacgagcagatcatcgaaggtcgtctacgcttcccaccgaatatgccacctgcagctcagaacatcatctccctactctgtaaaacaaacccgtcggagcgactgggccacatctctggtggctcgactcgagtcaagtcccatccgttctttcaaggcatcatctgggatgatttgttttatcgccgggtgaaaggacctatacttccccgcctatcccaccccgcggacacgggtaactttgaagaatatccggatccccccgacctcagaaacacgaacatttacacggaggatctgaagaagaagtatgaggtattattcagtgacttctgaaagacttgtttccaattacggcctatcaagctcgcaccccaaccttcatttttccggcattctcaaatgacggccatttctctataacccccacgggacccccacggcacgcgccccgaatgcttctccgctcagaggccgcactcacgaatgatcgcgatcattctcgccaatctcacctttcgctttcagatacgatcccatgacagttcttggtatgtatgtctgtggcgaatctctcggagagtatcacacccctcgccatgctattcaaccggtctcaccgccaccatttgaccttcccttcccacatatccacacccgtggacaacgatatgaagaccatcccgggtagtatctttttttttcttttttacttcttctttttttcatatacacttccctttcgcaaaaaccttgttttgatcgatcatggagattgattaactggaatctatcaaaactacagcaacctcgcaaggtctttaagcgcaatcatgtgaatgggagtgtgttaatgctatttttttactctcttttcttcgtaaagtgatcaacatgcatagtcatgggttgtagatcacgatggtacattggtggttgctttttatacttagggttttcagtatcgtccataagataatgcttggtgcatccgcatgtagttatttcatcctgaatatatagtctcgttccgcaaattccatgtcatattacaatcattcaatagatcatgcctcttgcaatttggccagtagatacaaacatataggaagggagagaaccctatatactagtttggggtgcctaggattgacgtacctagttatatgatcatcagcaattgtcgcagtgggagctataacgcaccttcttatcgtctttggaatattaatgtttatctccttgttcagataaatctgagtgtagtagaaatacatagatcctcctggtggcaccctgacgtggtgggccttcgagcatacagaaaaccacaatttatcaagcccacagatgatggacttcaacctttgatatattgtatagtatgtactaaactcaccccaacagattcttcctaggttgctttgcacaagcggccatccttactctcggtccactcgtcagacccgacagcggttctagcgtagaagatattgttcggatcatatttagccttgaccttgcgcaaggtatcatagttggtaccatagaagaccttcttgaagttaggctgttggaagtcaccctgccaaaatgataagcatgcgtacacaataatgaagggaatcatagctaaatatcagtttacatacctcattcatataagcaccggacttgggagaaagcgcagtcagcttcggaatgaaatcctcggtcatttggcgctggcgctccaacatgagagcagagttgtcccactcccatggggtcgtcaaagtagtatcaatcaaggcttcgcgccaagcagggaggaccgcgttgtggacgtctccagataccttgtgggagacgttcaagccgacgccgataaaagtgccgcccgcctcggtgatctcacggtaggcagtcaacagggcgtgattgttgttctgaacgaccgatctcggaaccagccagccgccatattgggccgtgccaacctcaatggtgccttgcatgtccttgaactggctgtagtagctgtcgtattgcttggaaaccatggtgtactcgatgccgagcttgtcgaggctgttggtgaaaggcttgagcagcgtcaccaagtcagcgacagggatgttgggaccggtgatcggagcaatagagaagctggtgttggtgaagtaccagacgctcatagcacctgcgtcgacgatagcgggcagggcggcgtggaaggtctcgatggtattgaagaaagtgtcttgcgagatcccatcattcgtgtaggtcaggttcaggccagagacgggggttcccgggtgtgccttggaggtcatggaccagacgataccgtaagtgccagcaccaccgccgctgagagcccagaagatgtcagagtgctcattgtcgcgggtagccgtgatgcagttgccttggccgtcaatgacctcccatttcaggacttgatcggcggccaggccatagcgggagcccagtgcggagtgaccgcctccttgggtgtagccaccggcaagaccaacggtgggacattcgccgccgacgacctggtaaccagtttcctcggcgatctcgtaggcttcgtggccttggattccagcgcccatggtaatggcctttccggtgtagtgcttgtcatggtaggagtcgattgacagatccttcaggtggtgagtccagattgcaagcgctccagcgccagtggatcggccattgtagtcgtggccggtgttacggatgacaagacggatgttgtgcttcgttgcgaatttcacagcgttggaaatgtgagccgggctggtgacattcacgctgtagcgcacatagttacccagggtgcagggctttgagacggggtggaacggatcgcaagcaccctcggcaaagaacggcgccataaccgaggaagatgattcatagctgtcagaaacatatgtcagtactggccctttcgtgttattctatatgcagagtcacatactgctcctcaggaagtagccacccatccttcaagactgcacaggtctcggaattgtagttcggcgcatggcaaggtgtgccgagagggacggtcttgactagtcgaccatcgacggttttgttcaattgggaccattgatcctcggtgggccagcaagcatcaccgggaaagcaacggcatgccgaggctgaagcctgaggcagaactgccaacagcgaagcaatgagggatgcgcggaaaaacataacggattgacttcatgcaagtgtaccaggttgcgttcaaacgttccggtcttatgcgcggaaaagctaacaaccagagacggttcgcttagaacatagaaaatgccgcggtatcgcaatatatcttgaagctaataatccaccacgccatccctgccagccttgggaagcaatatcggaatgcagatcggaggggccaaaaccagccacccatggaaaagcctgccgtttcccccaccacccagtcttggaatcttggaagccaggagcactagtactccgtactacatataagctggcttggtacgtatgcaaactttaacataagccaccccaagcgggttcttagggttggaacatatggtccgagtaattgcatacaattcaggggcagatctcacctttattttagctagacctggctttctgctccctccttgaacaccactcgatgtgttctagattatagatattttttctagatggcacaggtctagaatgtataatgcaaaatcgtgttataatggcttgctcatagctaactaagccaagaccgaaaaaaaaacagaaaattcttcttattggcaaattctaattcatatcctctcgtttccacgctcgtgaagctagcgctgcatcttaattgcgccgatataagccccccgccgccccgccgccccacccgaatcaagaaatcttgtacgttgtactgcgaaatacccgtggactccgtcacaattatgaataatatgatatctcctttgcagaggctatcagctctccttgccgtgacaatgatcaagtcatgggctgggtatacaacctccacgagaccgatccaaacagcgagattccgcgcgtgatcgggatctgcttggcgtgttcaattacagctttcctagccgtatgtctgcggttttatgtgcgaatacgcatcagtcgctttccatggattgacgactatgcggcactggcgggctcactgttgacgttggcatacgcaggtatcgccgtggctcgtgagtcgattctcattgatcagcgaaggttaactgccgaactgacgaaatggttatttcagagacgcgatggggccaaggactcagcgcggcgtattttccaaaagagaatgttattccatttagcagggtacgcatcgcaaggtcaacattgttcgaactcgagcccgacgctaactttgtttggtctatagatccaatacgctggcggcccgacctattgtctcgctgtcctcggcttcaaagtcgccttgttggcctcctatctgcgcatcgcggggattatcgagcgatatcgtaaaatcataattgccactattgtcgtgtgtgtcgttaaccaattgattttcgcctttatcatatcaatctcctgcataccggttagcagctccccaacattacgcgccactcacaggaaacgggttatctgacaacaaacaggtcgcaaaacaatgggatacttctctcaaggggcattgcatccaaacaataccgttctactttgccctcgggggcacaagtattgtgctggacctgataatcatagcactacctctgccagtcctttggaaactccagctccacctcaagcaaaaagtcctcctagcctgcctgtttgctctcggcttctttgtgaccgtgatccagatcatccgcatcctcaccgtctgggacttgaagacctacaccgacagcaagaatatcgtgatctggtcttgtgtcgagaacagtctgggcgtgagttgatttgtgatatttctgcaagtccaaggaaagactaacaaaacgaaaacgtgtaggttatcatcgcctgcattcccacgtacggacctctgttcaagtcattcgcttccactgttaattcataccgaaatcgcgaaacttcaaggacttatgcgcttggctctgttcgccaggacacggggacggggacggggacggggcctgggcatggaaatagcaatttcgaacctatatatgagtccgagggccagcagatcactgagattcgatccggcgcgcaaacgaatgatggggatagcgaggagcatatattatcagaggcggagaacttaaaagtatatgtaacttcggagtttactgttaagtctggcgcagtttgattttggttggtaatagggaacttggaaagcatgcttttgaatgggaaatagaagtacatatgcccgataccaaatacgtgttatctagtactcggattagacatgcactgttgcaaattagtcgtgtgtaacaagccccattcataggcaatgggaaattctcgaaaagttgccttttggctatcacaacaatgagattggaatctataagcagctagtatagctagtagtagcaaaccatttaccgagaaaaaaaaaaaaagcaaaataacagtgtacataacaatgaaaaacaaagttggggaatcatatgaacagatatcatgaaacatggaacgggtttagagcttgcgcctgggttcggtcatatccaaggcaccgatgatgacagttcgatgccgatttgagagttttgtgactggagtagaaacaaccggaaaatctagaagggaggcgtggatgattaaatcggagcaaatattgagatgaactgcgagcaagggcctgcgataggtctccgatactatacagtgtacaatgttggaatggaatagaataagctttgggcatttttcatagcgatgggtctgtcttccatgtgcctaaaaaatgttagtactatgtccatgtgaaactacacgaacgtgtcaaaaataaagacgtacctccgaaattgtgcttcacaaaagccatgggatcatctgtatcccccgcacccatttgccccactccagggctgaagctggtaatggggagaacaaccacatccccaaccttgcggtgcgtggtttgatggctgaagtcttcgtaggtgatgttcttatcaccaggctggatattgaagtatgccgggttgttgaagtagcggaaaatagaatccgtccaggctccaggccctgtgaactccataatggtcttatccatcttaccaacctttaggatgcctgcctttttcattcgcagagcatgctcggtaatataagccaccatatcacgaagaatcggatgcccgggtttagacacaaaggtccactggcagaactgaagacggcgcgaataccagtcgtgccagtcatcacggtcaggatcagcttcgatgccaacaatgaagccgatagttgatcgatcgagttcctcggggagccacgtgtgcgcgggcttgagcgccgaagtgtcaatatcgctgtatattcccccgcgcgctagaaggaccaagtatcggaagaaatccgccttcataacaccgagcggcagcgaatcatatgcctcaaatacctccgggactgatccatatagatatttgatcagatgttgttgtgtgtcatcaggaatgacttcatgcgtgaacccggggtgcatctctgtccagctggcctcggggccgcgaaggtcttcgtcaaaccagaacgatcccgggctgtatttccatgtttgccagatgtatgcggggaatctgttttcgatttcataggggaattgataccggagacgttcgcgaaggggtgttgtccgtgatgcgccgaggggtaattgggcgcgaccttgcggtggtatttttcgtgctaagtttgctatcgcctcatcctcttcctgcgatatcttcttcaccggtctatacccaggtgccccgggaacttcaggatctcggaacgagcggaggatgagaacaaatgtgaccacgcagaacagggcaagcagcaccttgcgcggggtaatcatgacaggcgatggagccggcgcagtcgggaaataattccctggtcttgcgacagccgtaaataggctgaaagataggaatcaagtcaaggcctctgtgcttttatcttctgtgatccgcgggattggtgaatttgattcttgttatgcgtttccttcggcgggtgtgacagtcgagcgattccaaatcctaggctaaagaaattgagagggtgacatgtcgatatgcggaagtcttggatgtgacctcgatggtcggagatacggtcaacccaaaatcgggataggaggcgtgaaaaaccaataataattgagggtgactagtaccgcagaacagcaaggataaattgaatcgaagagcaggccacgctgtctagcagcgggtaatttctcgccttgttggctaattttattagacgtccacgagtagaataaggattgcgtatgccggaagcagcttctagcctgggtggagccactcacgtggtcttagaaatgtaacttcaaaccgccgtctttgatattgtttgttcttcatttattctttgttctgtcttttgcaaaaaaaaattttgcatatctctatgctattaacaagcaatgatcctactgcataatcacttggttttgttagagcgcccccacataaggtgctcgattcagaatagtcttgatctttagtttcttaactaaactgcgtaaaactacaatgctaaaattgtctagcctcgtatccaatatatataagtagtttagcatagattcactataaactccgatagtgatataagcttcgcttggtttagaaatctaatatggaaccctgtacaatatatcgcagagcaaagagcatccttttaccgaaaacatcagatctgccaaactttagggatttttgggctctttacttttaggtgattaacaagtattcaataaccatgtaggaagggccatgtactactattacgagaatacttgttcttttgataggactacgtaggcataggcttttgtcatattttgtctccacttttcgcattgcggactaggagacgtaagaggaaaacgggtcaaaggcaccaaaatagtaccctagagaaatgcaactataaagaatattgttagagatgccggtgagaggcttgccggccgataccttctcgttatgctctagatctttatccctattagcaatggagtatctctactccgtagtgaacaataatcttggctccgttaaaaatcctattttatatcatacaatataggatcatcggaaaatttaattagccaagggggagattctctctttgtccgtgatgatcttcgtggtagaaatagcctctaatactattaagaggatttactccgcttgatccctagaagcttaggtctcgcgtcaaagcatttattctcaaccttaaggaatggatttttgttgcaagataatatggtttttatgataaataagactaatacgcgaacgcgaacgtgaacgcaaagtgaaagcaaaatgaaagtaagacaagatcaatccaaaaggaacatcatccccgacgcatgatggcacatagattgaggaccacttctttcctattggactcattgctaaggtcgtaccagggagtggccaccacaggaatgaatgagtctagcgaatccaaaccaaaatccttaacatactcatcgctaatctcaaattggagaaagcgaaggtagtgctgcgtagcatgaatgactatgacggtctcacgctgcacgtcaacaaaccgagccaacagagcctcgcatgtcatctgggctagacacgcgtctgagatgatcggtttaccctcctcaaaacattggaattttctcttggcttccagaattgccacatgatcgttttggagtataaattccttggcattattctcatcgcgtgagcaaagacctccgtcatcaatggcagtaatcgagctaattcctcttaggactgtccgggttcgtaacttgatgtcccgaaactcaacaacactcgacatattgggctggtcttggggtgccccgaaatatagaatatgtcgaatgacgcatgatgcaaggcgcacggtctcatcttcgaccgtacctcggagttggtgttcctctttttcaatgtatccagccgatgacgcatcgctagagctcggagcccggggactgctagaagcaacttgaattgtcccagaggggacgcattcagaaggggacggttggttcagatgattcttcacgcgcccctctccccttagccctagtgatgcggccaccgtcgaattcagtagccattggaacatcagaatccgcgccatcagattcggtatcggaatgttcggaattgccgggggcaattgcatatcctgtcctcttagcgtcacgatcacccttgaatgctcccaatgctgaccacgtttgagcgagcgaaatgctatacccaaagtctcgcacaagactgtgctcgcttttctggaaatgcgtattgctatcagggcctccgaggaacttcgtgatatccaccgaagacgtagtatcggaatatttaaagtgttgggacaaaattggaagaatattgggcctttgtggtcgtattataacacgacaggcaagtagatggtcccgtccccatccactcgcggcagacattttgagttcggaagggtacttctgatttcttcccttgaactgaatgacagaggtgaaagtgtcgaaataatggggagacatgttgaagaacaaaattgaaaaggagagaggatctgtgatgataagaatgaacttgggcaggcagtgcctttttataccacctcttctgcaaatgtttgcctttccaccacatgaccatgaaacagagtgttggtgatgaatgcctgtataaccgccaggcccctcattttgaaactgctggcttggagtacaactgcagaggtccaatcggtttgttgggttagtattaataggcacgtggctggccaaccatatacatgtattatccctaccatatgtattattctaggccaaaggctcgtgaaaatcctttattagaaacatgagctagcttagttggcccctgacagctcccgtggtctgagagtggatcgtgctttccctaagcgccgagccccgtcatgccggacagtgacattcgatcacacttatcctcgccaatggccaggaacatccagctagtcatacatttagcgctgttaggtcataatacgcttctaggacccaatttcagcccaatttaatgtaaggggatcattgctaattctgaaatatggatgtgaagcaaaaatccaccaatagttcaactgatttgcactttggatgatcgactggaaacatcaaattagctgtacctccccttagatctggattttgctagttcagggacttgactaggctggaggtcagtataggacgggtgaactttcttccggatcaacactcaaaggcggtcaagacccgttttagactcccttgtattcccagttccttaacctcatctttacaagtatcttcagtatgacagctggcgcaatttcgcttgctgagctcatgagccatcatcgtgatctcttggttcaaccaatatgctggacttctcgtcatttggatatgctgggatgtcaatttgaacactttgaccatgtgccaccagacgacatcgaacctgatttagatccatgccaaccaattgatcacgaacagaagttggaagaacggagtcgcggaactcccgaggaactctttgaaggctcctctatactaagccggccgttcggcctctcatttctcatatggcccttgcttaaccgaagatggtgagcaataaaagccgttcgtgtcattgattcattccgccataactaaacattgttcacagtgaaacaccgtattttttttttgcaaataagagaattcatcggcctctgtatgaagtgttctatcgctgccgtaaactcagccagccagctagccaagcaccgcggccaatcgttggatatttggattattgccgcgtagaacgttaccgcggggaaatgtttatccctcgtacgcccaaacatggcggtgacaaccgccccgggtggagaattcagatgaaacgagtagcccagatcacaccaaagaactggagcgaggatccgtatctgctgtgtgttctgttgtcccttgcacagctccaggagtaccatcgaaaagagtggcacccgcccatccacatagtaagtactctgctactcctgccgtttttcttccttggatgcctggctcatttatacaagtcgcgtctgattttgacaaccaagccgggcgataaattcttccatatttttgaagctcacataacttctgagcttctcggaatgcttgacaacccaaatactgccagaaagcacatagactggccgaccatcaaacacaaaaaggtcctattcagacctcttgatagtctcgcagagcgacttcaagctgagatcacccttaaccagccacctggcacattcgatatctcagatccagctaatccaaatgacatcaaaaaagaagaagaggatgtaatccacatccaaagaacaaaagaggtcgaaaggaagaccagaaagagagcaaaaaaagaatcattcgtccgttccgagacaagagtttcatgaaaatgcttaaacaaggattacgacaattacgccctggttggtctgcgaggtcggctattagaccacactacaccacaaacgactccaaattcccatcatcaaatgatgccatgtctgttattctacattccctttctgcgacctgaaatttactcccatgacaagccttacacatcacggaaacggaatgtctgaccgtactcggacgcctggaggccagatgctgggtaaaggataaagggcacaaaatggatttggtttctctctatttcccaatcggttcgctcaacctacgaaatgaattacgatagtataaactcatagtggaaagattatgtccttggatatgtcgaagcgatacacaaacagcatggtccttgataccaagccagccaagtgctgtgttcaaataccaaagaaaatgcatcacaagcaacatgaatactgttgaagcattgagtttactaaaggctatcaattggtcttatattctttcctaacacttaaaatcatgcgtaaaaagtcaaattcccaaccataacagcatagaatttccgagtgagcatacggtgatcacttcatggcaactacacctctggctgtcaaccatcaactatatatcttgtccgatattcatatctcattcttctgatcagaaaaatccgtttttcccacgtaaactaaataacttgtgatctagacaaagccgtttggatagcgaatcaaggccgtcagctgttgtggaacatgatccacactgccatgtgggactaatcagccgcaaaagcttgatagataagcgtagcagacctcgggaaagaataaacctgatctagcagctttataaacatcaagactagtatgttatatagaaatccgctttggaagtctcgttaggtagacgcaacggattgtgagttagcaacatagacgctatccagttcaactagcaatgctctttttttgattcaagctttattattcatctcaattgttctataattcgatgatagaaacccagctttccaaaaccaccgtatgcccagtacagataagccatcacctggtccctctcgctgccgaggccagccgagagcaggtgatttgattcttcatgctcgactgatcttaccatttcaagatactctcctcgctggcgccacctttctcgtagtctctcatctaacggctgtccatcttggtcgtatttcctaggtaagtcaaaagaggcaggtatggtagcgaggaagctggggaacgaaataagtttgcagagagccgtaaatgcgccttcccagtcgatgattcccgttatatcgaagctgttttcatctaccatggtctataatcttactatatagaaagtcatcatggactagagggaatggccctttgttgcacatagatagccggctagctatcgctttgatctgcaataggaagttctcgataatcgtaatcatctatttcgctgagatcggccctctctgtatcatatatatgatcgtttctttatcccacttaaacttaacgctatcggcccacgtctcgaaaaatgcggttgctgtgttatcgaatgtaccgccaattccgggtaagggtctacactcgtatccaccctctcggttccgaaaaatcatcccaattttcgggagtcgtaaagaagttaactagacctatattgagaggtaagctaggcaccagccggccctataggtcgactaacatgacagtttgcgacggtgcgatagaaggcttatcggtgctctgtatcacaattgaagtcgtaaacgtgtggcgatgcagccagagagcagccccataactataaaggcagatcccacaggattattctcgtcaatctcatacgcaaaaactcgaggcattggtaactgggaatgctccttgatgagttttattgctacaacttcggattcgagttgggagctgctaacgacgtaagaggtattccttcgaatctgaacccgggctacccagtgagtctcgtcgcaaaatttagtacacggacaatattattgagcctgcttgcaagttgcgacctggtctaaaaccacgcattccaaatggccagcaaacccaaagtaattcggcagagctcatcccattgagtccgatagaaacaatcggagatttgactattacatctttccaggaaatcatgctcggtagtccaaggggttgagctgggagacataatcacggactatcgagttcatgtgggatatcctcgtaggcttctataggaggagaataaaatagagagaactgtataaaataaaactagcagcatacatacttggtacgtgcacgccgtattgttccatcaaatgaaaggcagaggaaatcgagaggacaatcgatccaaaaggaggtatgacaaaccagatctacagagggtacttcattcaaaagaacagatataggcaagagaggagcaagaagtggtagtcctcagtaaatatacatctacaaattatttaaagtagcaaattgtcaaacaaactgtcgagcaatttctacaacatagcatctctggcacgtgatagccctaggtcatgacttgtggggaaagaccaagggtctagcccgccccactttgacgccccacttactcaaacgggccaacataagataagcaataaggcttgaaactgttttgagattgaacaacgacctcgggatataagagatagtaccccccacatattataggcctcctacatggagataccgcactgggctgctagagaggataacctgtcttagcaaatgaagtgctcgatctgttaaatcatgaagtgcggaactgctggttttatgtaggggctacattgttactcctgcggatgagggcagaggttgaacaagacaggactggcggataagcagaaattatgggcctttatctaggttcttacgataaaaataatcctcagcatcaaagaggagccgggacttacctgtcatgcttgaaggagatgatcctcgacgctttcatgcggctgaagaattcttaacttaatatgagatacgatttgtgaatgaatcgatggtggaatgttaccttcgggcgactcatctgagatgcattgcttaaggccacactaactacaccttatgtgtttttattgggtcggcaaaaatatcatagaaatgtgtgtggagcgagggctcagagggaaaagtacagcattgtccctgtggcgactgcgatgtacaaagactagcaacttttgcgcgattttcctttatagcgcctattctaaaagagccaatcatcttctgattactcctcgtctgaattacagccaatcagtctgccgcttccaaagttgtgtctcggcttattcttcccgttttcacatcatttgggccatttatcacctcttccaaggttgaatggcatgctggataagataagccctgtagactcccgaggtccagaagtccataaatatctttctctcgcttgtctcttaacctccatacccaatttcaaaccaattgcagtggaagtcattcactatggaatagcccgactttcttgaccttcctgctcttacccagagcctcaaccactaagcaatcttgattcaagccaacggtgtctttctgcacaagaaatcccagcgccagcttgccttgatttcactggaatcacggaaaagaaacaatggcgactgctgtacctgaaaaatacgtggttcccgctgtcgtccagtccatcgtagttagtgaaatcccaggcagcagcattaaatcttccttggattcgacagtgggagccagagcagaaaagggagaaaaaaaaaacttttttactcgaccatggggacgacgtcagattgggatactctgcgttctggggttcttcggattggccttaacagcactcgtcattgtcctccccatttatttcactaagatctacggctttgcgaaagacactgataactactggagactaccccagccaaatgaagaccacagctactacctcgaggagaatcgacctgtcttcgccctggtcaatttcccggacccgggcctcattcaacacaatggcacatggtatgcctacgggaccaatcccaagaaaaagaacccccacactatccatgtacccgttgccacatcgaccgattttattaactggactcttcacgaggattacgacgcgatgccgactcttggcacttgggagaagaaggtcaatcattgggctccggatgtgattcagcgcgtaagtataccaatgagcattagctcctatccagtatctgatattcatatatgaacttttaggacgacggcaaatttgtcatgtattactcaggagaagccgagaattacgggagccaccattgcgtgggagttgctatatcaaccggcacgagcccactaggcccttacatccccgaagacaagccactagcctgtccacacaagcatggcggtgctatcgacccttcaccgttcagggacaccgacggcacgctgtacgtggtctacaagggcgacggaaacagcgttggacgcggcggcaactgcaacaacagcaagaagccagttgtatccgttccgattctcctacaggagctgaagagcgatggtatcacatccgtcggggagccagtgaaaattctcgatattgacgatacagatggtcccctggttgaggctcctgatatcttgctcaccgaggacggcacctactatctgttcttttcttcgcattgctatgtctcgctgggctacaatgtgaaatacgcacactcgaaaaccctcaagggtccgtacatccgggctgatcggcctttgctgcagactggtgattgggggctcgaggcgcctggtggtgcgacggtttcgactgatgggagcaagattgttttccatgccaattgcggtagattccggtgtatgtggtctgctgctattgatattcgatctaataacaacacgattgttatgtcgaaactcgtgcttggccaggcgtcgaattctacgaaaactacgggaacactcgtgagccggactaggaatagcggattgcgatacctttgagcaagcaggatttactatgatatattcttcacgacttttatgttttgaatttttttgcatctcgcgctgggcgttttggatttcctcatttttgctaaccgtttgtatgagaatcctctagggacctcagctatagctactttttcaggatctatcaaaagccgaactttgcatgcttccaccctccattccttgtttattagcccttcgaacactggatttacttgatttcttcggtagcctctagcaccataaactagccattctccatagaaggtagaaggcgaggatacaaattaacctgctcttttggtactccgaggctaatcaattccacatatataagacagccttgtcagacaaagttgcaaataatatctatcgtatgttgtacattgacattgcatacttcaacgctgaactctccaccaatcaccgatgtcggtgatgacgcgactgcttagtgcctgaggtgtctacatattctcccaccggtagctttcaacctaggaagctttctttccttcctgactctcacagatcctacgctcttataatgcagtcgtttcgaggcgccgcccgagctgcttcacgcacaattcgaacccagtcatggcgacaagccaactcccctgtgaacaccgcggggtcgcatcggactttatcggcgccatggaagaccgcacacccattgcatactgtgtcgccgcgaaagtcagcatcagccaccgcagagtcaagtgagagagactcctccaatccagccatgtcattcccctgcctcgatgcccaagaagcgaagtcagcgcaactctccgctcggtcgctgcaatccggccccgaaccttcatacaccactgggcggcacgaatcataccactgtgaacagccgcttctgctcgactggggcggtgtgctcacagaatttgatattgcctacgaaacctgggggcaattgaacggcgacaagagcaatgccatcctcttgcatactggcttgtccgcctcaagccacgcccacagcacagcgtccaaccccaagcccggttggtgggagaaattcattggccctggattgcccctagacacgaataaatatcacattatttgcaccaatgttctcgggggatgttacggaagcacaggcccatcttccctcgatccgtccgacggaaagcggtacgcaacccgcttcccgatcctgactttggacgacatggtccgcgctcaattccgacttcttgacggcctaggaatcaagaaactcgctgcctccgtcggatccagcatgggcggcatgcagagtctcgcagcaggcgtcctcttcccagagcgggtcaccaaaattgtcagcatcagcggttgcgcccgcagtcacccttacagtatagcaatgcgacacacgcagcgacaggtgctgatgatggacccgaactgggcgcgtggattttactacgacggcatcccgcctcactctggtatgaagctagcgcgcgagattgcaaccgtgacataccgcagtgggccagaatgggagctgcgctttggtcgccagcgtgcagaccccagtaagcagcccgctctgtgtcccgacttccttattgagacgtacctcgaccatgccggtgagaagttctgcctcgagtatgatcccaacagtcttctttatgtctccaaggccatggacttgttcgatctcggccatgctcatcagagcgcgactctgaaacgccgcgcagcgtccgaagagcgcattgcgcacggcggcgacgtcccaattggctcagactccgcttgcagtctgactctcccagacaagccctatgaggagcagcccggatcaacctccaatacgaccccactggacaagtccgtctcagctgactcggtggatggtcctccccgggatcttgttgtcggccttgcgcctctcaaggaccaccctgtgcttgtcatgggtgttgcaagtgacattctcttcccggcttggcagcagcgggagattgccgagacactccgtgctggaggcaacaagaatgtcgagcatattgagcttggtgatgacctgtcgttgttcggtcatgacactttcttgttagatctcaagaacatcggtggcgcattgggcaagtttttgcgctagtcgcatggcgatctgcgtccgaggcgataaagaataattaaaaaatttgtaaatacgtcgttcagcgtgcgacatttggcatttagtaggcgttgtacatttacgaaatggaaatgagatgcctcttctctgtttttgtttgcagtcgggaatcgatggatacctccagacagtctacaagtggatggtacgaaaaatgaacagatatgccgatgtattatttcatttgattctaccaagaggttatatgtacattgaactccataaaataaaaggaaactcgccctcaggttgctctcagttttcataaccggcttccagctgtatacacggtccacaggcacgaagtgccatgaatggagccgtcgtcaagcagatgcatcagaattggcttatgttcgtctgagacgaactcatcacagggcgagaaggggaaaagctcataataacacgacccacaaagcccacaattctaaaatatcaccacacccacaaaaaagcagaaaggaacaaatataaaatcaagactgagaacatgaaagtcaggataaatgatgaaaagtaccaaatttcagttgacgtactaggagaacccagaacgtttatagaaagactacagtcacattgcccacaaggccaaaaatccaaaaatccacgagacagacaccaaaagtaaagcttggaagctaagttctttggtgaaagttttttatagaatcacaagacaaaccaggaaacccagaatgtcattgatagtcgaatgattattgttcgccaatgccgcattggagaaacgtcaccttaatggatattccctcgaattcagcagcttaaaggtgcgaaagagaggaagtggagaagggcaggtatttatactgcaggcacagagtgcacaaagggaagggtcgcgtatccgtttgtaggcagagctgttgtccttgaggatacgcctcagcgtgtcatataatgagtggctctcttcaacagggagacgaagcaacctccgatatctatcatttaatcacaatagctgtcgaccgtttttctccacaagaagatggcctatctttgagacttgttagaggctatgcggttaactctttagattagcaggtgtcataggcgtgtgatggtagccccatgaagtcgctgttggctgttgcctccgcgaactctgcattggagatcctaaggtgcaggatatagtcatagacttgtacaaaaatgactggagataaggaattcaggcttggccaatgccttaatgggaatataaaattgacaagaagcactgatgttgttttaagtccaagggattaaacgttcttccgtcccggtactaccagtatactgctttctgcctgaggcaaaagccatttcgatgcctggggctattctactgcatggtctctatgacgttcagttaggaatactataacataggaactgtttcaaaattgtgtttctaagaggtcatttggtgctgcatttcccgggtacttgtgccaacgaagggatgaaactatttgtatttgatctatcgcatcacgcccaagagtcattagaattcagaaactggaccaaataaaacaggcactatgaattcagagaagaagctcaagataagatttctaaccacacattggtaataaacatgccctcagattgaaaactaccatgttttgtcactcgtcaccggcgtgcttgtcgtttccttgaaaggcgtacagacgaagcacatatacagggcctcggagtatgtaactgtattttctcatcactgggatattataggagggaggacatgaaaacacctcacgatgaatatagtactcgggagggaacaggtgattggcaaacaaaaccgaaggagatgtgagatttggagatatagaatatgtacaacacccctaaacgatgttagttgaacacattcaacaaaattccttcaagataacacataacaagaaatatcaaaggtccgagtctcgtcagatctctgttcattgttcaatcacacacttgtgggccgatgtcttcttccaccccgaggtatcagggggatgaagtccatggcccgacgggttcagtcaaccgacatgtcatgaaagctcttgtgaggtttatcgtcatcaagacttggcacgagatattccattgaatctgcattgaagctagagaccagagaaccagtgtgagaaaaacataccttttgtaatggatagcgaataattaggccgatgaacgcgtcgttattgcatcttctcaagcgataagacatagttgccggcattgaccgacaaatttttatcggattaaacatcaagctgtgcctagacgcgactttctcagtcaggctctataatgtgatgtcgagactgatggctacatcggtctgccaacaacgaccttctattgagtgagatgatgcaagagcatatatagcaatttcataagataattggccggcaaaagaaattgtaaagatttcggagatcgcatgagtgttgttagaaatatggtaagcacggttatgagcacgttgaccgcctaccataccgccttacttagtccctgcacaattacctagcaccgcagcacgtgatagccggcgtagtttcacgaatttggcttgcatatattccgttactagaagtccatatctgcggtcggctacttgtcatggtcagtacatcccacatccataatggctcccccagtatcaaaatggtggcaagagcccaacgaggtcgacctcgactacggattcgattctgacgaaccggataccagatataacgaacctgatcgaaacacctcccacgagaatagaagcaaatcgagagatatccagaatacatacgataagggtgtgattgcaagcatgtcttcttggctccaccgtcaggctggtaccccccacggacagcttgcgacagcggccgtcgtatccggcgcagctgtcgcaagtgccatccttgggtaccagtcatacaagcgcaaggaagctgttcacgatctgaaggcttcgatcccaagtatagatgatttgcatgctgcagaaatggtgagatgcatcggtgaacctgcgcattgagtgccaagcaagctacagggcaaaagctgattcggcggactatagctcaccgattttggcgctgcctcgaatggaatacagctgagcaaggaagatcagcgcagtgcagctttagctcgcagagcgcaacagggggactacgatgatggtatgtggcttttctatggcatgcttctgcgaacctatctcactcggctcgtcttgctttgatagacttgattctagaacagctcgcccgcaaccgtgtgttccttggcgatgaaggccttgccaagctccgatcgtcattcattgtcgttgtcggctgtggtggtgttggttcgcatgccgctgcctccctggccagatcgggcgtgtcaaaaatccggctcattgatttcgatcaagtcacactatcatcgctgaaccgacacgccgtagcgacattggctgatgttggtacgcctaaggtccagtgcatccggaggggattggaacaaatcgcgccgtgggtcatgttcgattgccggaatgagctctatggaaaggccgcatctgacgagcttcttggcccgtggtctctgacacacgacggggagggccgtagaccagattttgtgttggattgtatcgataacattacgtccaaggtagagttgctacactattgccacacgaactccttgcctgtgatttcgtcgatgggtgcagggtgcaagtcagacccgactcgcgtcgtggtcggtgacatctcgctcagcaccgatgatcctttgtcccgcgctacacgccgcagactaaagctccttggtgtttcgtcaggcgtcgcagccgtgttctcaacagagaaaccgggcccgggcaaggctaccctgcttcctctccccgaggatgagttcatcaagggtcaagttggtgagcttggagttcttcctgacttccgagcccgcattctcccagtgctagggaccatgcctgcagtctttggttacacggtagccaaccacgttatctgcactattgctggctacccgcttgactacaatatgggcgccaagggccgcgagaaactctacgataccattttaaatgcattgctaaacttgcatgaaagaatgatcaaacaaaccaccggtcaagataccgtgggactccgcgctcctctcagcaaggatgacattgcattcgttgtagaggaagtataccggggaaagagtgcgatcagtggcttgtcgaacagactggctctcgttccctggcaaactcccgcacatggatggaagatggatctgagccttgagaaagagggacaaaagaccgtcccgatgaacatcaatgaactggtctgtatgacgaaggaggaggctctccgacacgaaaacgaggtgcttaagggtggcaagaaggtggaagatgtatatgatgagactgttctccagcgtgtaaacctgcgcagacgggaagcggaggagtacgatcagtaccgaggatagtgtaaaatgtacaaataaaccaaaaggacaaatatcaagttccaaacagaaacaatataaaggagtcgaacgttacggcctaataaaagaaagcgggtctaggtatacgtcagagccgcgatggttaattctgcctcttcacattcacctactctcgctcaatttcatcaaatgcagcacatgaagcatacagtacactttcagataaagatataaagcctaattcaggcgcaggaggatggcgcctcttgactcccatctgcaggacttcgagaccaacagggcagataacgactaccacccgaccacaacccaccgtccctcctacccaaaacaatttacactttattctcgcccactgattgattccgccagaaacgaatggcaattaagagccgccgcagattcccagcgcgcctccagctcctccgcggatgacatcaaatccccgggatggtcccaaatggctctctcggtagtttccgcgccgcggttccgacatgtgctgatatatgtcgcgttgtttctatttgcatttatcggttggcgaatgctggtttctccacgactacaagagcaaaaatccctgttgcattcacttgatccgacatctgagacagagacaggtgggtggttcgggacaaactcaaaccctcagttcgacggcttgattcagatccgtaccttggacccaaacctggtgcctgggaacatagcgggagtggtctcagggaaatctagtcggaaacggctaatcattgtgggcgacgtgcatggctgtaaagatgagtgtaagacataccccccaagtgcgggaatccctgaaactgacaagcctacaacagtggtgcaacttcttgaaaaggtttctttcaaccaagcaggtggtgatcaccttatttttgtcggtgacatgatcaacaaaggaccaaacagtccaggagtcgtggacttagctcgacagcattcggcatctggtgtccgtggaaaccacgaggaccgggttttgcttcttcgccacgagatggtgaatactgaaacgctcgcaacccccgatgacgatgaagatgctcgtttctcatccaaagaacttggcgagcgtgcagtcgcgcggtctttgagcgacgagcaagctcagtggctggagaactgctcagttattctgaatgtcggccaagttccaggtatgggccaggtggttgttgttcatgcgggtctagtaccgggcatcgaacttgagaagcaagacccttctagcgtgatgactatgcggaccattgatctagatacgcatgtacccagtccgaaaaagaacggcatgaattgggctaaagtatgccttctctttctatttcatttcttcagtcttgtcgtcatactgacataccttcaatctagatgtttgataagcatcaatcaaaattatactcgagcctcgagtcttctactgaagatccccttgcaggcaccatgactgttgtctatggccacgatgcttctaggtctctttccatccgcacattcacaaagggtcttgactcgggttgtgtgaagggggggaagctcacggctttggttatagaggatggcggaaagcaaagtattgtacaggtgtcgtgtcgtggttatatcgaggaataacaattctacacgattgctttgggtccagcattataggcaaatgtattcttatgtggtggctaaatgacatgtgatggaacgctcaccattatgaactaggtatggcctgtaggaagtcaaattcagattgccggcttaaagtttgattagtcgaagccaattgtcggaaaaataagacaataaagaatagcaccagaaacctcggtggaatcgatggtacgaactgttcaatccagcaggtgcttgatcaaccataacacagagagtaatgtgttgatccacgcggatgtgaacagaacagaactgtagaatatagaacttagagcttactgtatgagggagggactaagcccctgagggaagataactagtattaccaaagattccgaggtcagagcctatacgtcgcaaatctaccaagaatatctgtctaatttcaagaagcatgagggtatgtacagggtggcactatggcgcagttctctatccggacttggattcggatccaggatcctcagggatctcagaatcagggaaaacaaaattaccatcagcgccccagacagcaggtggagaaaagtcttcataccaaagaccgcccaaagcattagtgtgaacgagtccaaaacggaaatactccacctcgtcgggataagtgcgagcccaagtaaaatctggaaaatgctggccatccttaggtcggaaaacctggaagcgctcgacatcgttgaccaaaacactcaggccgtcggcatggggctcgaggtccgggaacgaaaaaacgaggttgttcgcatccgtcgtggaaggaggatatatctttggtggaactgtaccaagtttagcaccatcaaggagtgcgcctggagtttggaggatggaatcgaagccccagcgggcgatgccgtttatgaaaagaccaataagaatacctgagtataggagactgggtcgcgtttgcagagttgttccaggtaggaagagaagagagagaatgtaatggtggatgcgtaggttcatgttcggaacggcgacaaggatgagaacaactgcaacaaggacgccgtagatgcttatcgtagggaagaagcggccttcgcgacggtaacagtgtgcttgaccaaaggcgattacgatcaaagacccaactacaatgatgagagctgtgagagcacccggttgctgctggatatcgtgaggtgtgaggcgagagattggaatgcgatcaaatgtatccgtgttcagggcgccaacccagcagccacccagccacaagacggtcttgtcccagtgtgcatccaaatttttaagcgtgtaccggacgcagaagtaatatagcacgaatcccacaaatgcgccaggcaggaatcgaccgagcgcaattgacacaaggtcataatagctcccgatcgagggcgggtcggacgccatagcgacttggaaccagacaatgaaatacatcatggagtagaatgccggtgctgatgtcacgaccaatgataagaaggtggtccagatcaaagtgaaggcgaagagcgaccaacgcgcatcagaacacttgatcggtgttgtcttattcgagtctggggatgaggcttcattctctagtcggaatgacattgggaagcttgagagaaactcgatactttcaattccatgctgcatgatagattggaagtttttctgctcgccggtgcggtgcaggataccacatccacccctcgcgtcatcaattagaccagcatgtagtgctgacgcgcaaattgacgaatcgccgcggtaaatgctgctgttctgatcacccacctccagtggcttacctcccacgactaacggccggtaattgagctcctggtcgccaacaacatacggctccagaagaatcgccgccgcacagcctgaggggcagcggaaggcgaaggattggtcctcgaatgggcgacaaaggtcaccattcagtccgcaattcgtagaattgctcctatatagatatggtcaggttcacaatatcaaatgatctacttagatataagaatagaaacacaccatagacggtggtgacacgaaagcttgacgggctgcccaaaccccggaacctcttggcccgcgacagaagctttgaagcacgcgaagaacacgacaatccaaaaaattaaaccgccaaaaaggagcgcgatctttgaactcttgcgcggaaatttctggtcaatcagacgcgccggcgcagcctgcaagctaggaaaccaagggttaatgtgatagacatgcggcggcgtcgggccgcggagccaagcgcagaatcccgagggcgtacaagaaaacggcggatcacgctcgaatttccccgattgagcctccatgccgtcgacttccgagggcagaagaggcaggttgcctgattctaagtccaagctcagttcatcgctgtcgcgggcttcatctttgtaccgcgatccgatctcctgcaagggatactcggaggtcgacaacttatcttgtgggggtgatggcgcacttgccccagcagagtccggtcgcgactgcatttttatatacaaagtctttacctgagctctggcgctcttagcgggaaggaagtgatggaattcctcatgttcaatgtcgaactagcaaccttgttggccctggaatttcttggcttttagtcatccgatatcaaattgtggaccctgaatcccatcttggacgtgttcaaagatattaacattgaatgcatagtctagtcaagctatatgctgtgaatgtgtctcagagtgtaccaatttagtgtcatgatctactatagaccgctatcacatgcttatgttcgcttgctggcttactatttacatagtttactagttagtttgcatttcatggattatttgttagatcgctaggctttgcaacgtttgtagaagcgccagctatatgagcaggcaatctcctgctcctgcacttgcttcttctttccttttccaccttagtcaccacgttgaatgcactccttctcttcttcagatcgacctgacgcctcacatttaggatgataattctaacggtgacgttgccgccgactctgttaggtctccgcctcttgatagactacaatgggtagtcaataaacctagtcacactccctattatggatataccatttagtaaatagtgtcagctccctatctaagtcccagccgatagaaactctaagatcatcccgtatcaggtagcattcccgatctccttcccccgctaagtataatagtaacaagaaccctttgtggaggttgcgaagccgatcgccactaagtcgtctcaaccaaaatcccctcgaccaaagctgatccttcctctagggagagagacctctagaccggtgaatacagcagcagcagcagttgccgctaacgaccgtatagggtgctacaatgtttagtcttgttttttactgattagctctgttctattctattaaaattctattaattagttcggcaaacaacaatccggtacctccgcatatgtatagacaatacatctttctagaagagataacctcatccagttcagcctacaatagtatgtatttctatcgagccaaatattctttatttcacttctttctccctgggctcaaaatacccatcgtttgagcaccacattgctctaggaatgtacagctaacgtacgttccatccggatgagaattacttgtttgtttcccgaatttctatcaagtcaggcattgcttatattctttagataacctttctccatcttatagtacaacttaatatgtccacctatagataagcggaatgaaagagaaagatctctgtatcatgtggaagagttgcttcttataacacaacctattcgttgtgaagatagagcactagtgagagtgaggaaaaaagacattgttcttaacacgcaatgtaatgactgttgaatggttgattgacgttgatgatatgtggaaaaaaggcacgtgatatccgcaagctgtcaagctcatgatttcctcattcagatttcttccctgccaacgcccacgatacccgcgtttttcgggtcgctgacttggtcaatccttcatcatggtgagactcacacttatcagctcaaatccacggggaaatccccatatccatgtcgagtcacgtcttgctaattcaagcccccgctatataataggcacgcaacagtgaaaaagcgcagtctatgctgttccgcttccgcgcgcagcaagcagccgacctcggaatcattgatgtctcacgcacccgacgccccaaagcgatcacgtccatcgatacggtgccagtatgcgagcgctggcgcggacaggtcgtcaaagaaatttcgcgcaaagtatcacgcatccacgtgcaaagcctgagcgactaccagatccgcgatctcaacgatgagattaacaagctcatgcgtgagaaatgggcgtgggaaatgcaaatccgcaacctcggcggaccgaactacatgcgtggatcgaaccgactttacgacgatgaaggacgcgagatccccggcggaggaagaggctacaaatattatggtcgtgcccgggagctgcctggtgtcaaagaaatgattgaggctgcggttactcgcgcgaaaggaccggcggaggaagaggctgtgtctggccgcggtggagatattgcgacgaggaaggttgatgccaactacttcggctatggtctcgatgaagaagatggtacgttattggcgtatgagaaacagaaggagaaggagtctgttgaacacctgcgccaccaaggagaggatgatgctgaagatggctggcaatctctacctggtgatgcgggcgacggggtggaatggagactcccgacgctggatgaggtccaggaagagcttgtggataggcggcgccgccgccttctggacaagatctcttgatttagatactgcgttcaagattccctgtttctatttctgtcctttgcctgggttcggcgttacaggtgcttgtgcaatatctccacatttaaggcatcattctctgtttcatcgtaatgacaccacttgatcattatttccaaatatccacaatatcccgaaggcggattcattatgtacaatattttacagatcgctcgttgttgcatccggtttgttctttcgagttgtcctttccactctcaaggcctgcgtcatgctcatgcgcggtgtttgcgtaggatctccccgccgttgttcctctgcttctaggtcgtccaccaaaaattgacctagctctccttgtctccatttctgtataaaaagaagtgcggctccatccatcattggcaccccgccttttgcgagcaggccagtttggcgcgcaaagctttcaattaatggaaccacatcattggtcggttccgaccagcgcttgtatactgatggatcattcaggtttatatgatacaacaagtaatccgccatggttatcgcggaaatgacattgtccttgacacagccacagagagccagcttgagcatattctctgcttctggaacatatggcataaacactcccggcgtgtccagaacgtagacatgtgatccgttctcacgatcaatgatcttcacctgcgtggctaccttgcgtgtgataccgggttgctgcccggttttcatagccttggctttgcccgtgcctgagttgcgtagattgttgatcagtgttgacttgccaacattgggcattccgacaactaacactcgacagcctactaacttatcgggagcttcggcgtcggttcgaaggtgcttgatgatctggctgacatcttgccgggaggacgagctggtgaaaaacacggcgctctttggatcaaaaccttgcagtttgcgttctatctacagcacttttagctgatatccagcagtggtctgttatctcactgcatagccaagaagaaaatacttactattttctgggcagatgatctgggagtgcttcccagatctctcttagtgtagacgaccagtcgtcgcatcttgcccaaagcttcctcaaacatggggttgatcgaggtcacgggagctcgataatcacgacactcgacaacatagtcgatagttgagagcatgcttttcatcttggtcagaccagccctgtggtgtcctaagaaataggaccgtggaatagccccataatgagggaatacattgcgcggaacgaactgggccattggagctcgttgaaggatagtgtttttcagtccggtgaaatatgattcatcttaatcggagcggtggatgatcagtctcaagggactggattgattcaacaaataaaatcgctggtccgcggaaggcaacaaaaaacccgtcaaaatgtccagggcggaagggcgggcggtgagtgaatcatgtgcagcaacttagggctttgcagacttccgtagtgcttcattctggagattcatgtttcctttttgcgcgagcatagctttccttctaattcaagctcaacagaaaacacaggttaggtcaaccctacttctaataataatttggcgcgtggtacgttcggctgccgagcgggagatggttaccaaagcccgccagagcccgccagagcccgtcgatgcttgccaaagcccgttaactgggccccctagatctctaccactgctactttttgtctaaagtgatcaccgtggtttagccgtgtatgtgacgcaaacagacaaaccccgaggcagccctgcctctcttgtccaaccccacccaatgtgtctcgggatttttcgttctacgtagctcaattgtcactcattttccacttgtctttctccgttttcctggtcggggtttccttctgccgtatgctccgacagcgtcaccctggaaggctcattgaccaacagtgtggtggctggtccacccaggaatcatacgggtatcttttgtatcagacttatgcaaggaatactgccagtattctcagagcacaattcaatttgaggtccaatgtttcaagtatctttctcagaatataatcttcctattgagcaacgggatcaaacacaatagtcaagaatacttcatttcttgattcgccggtccacgacagacattcgtaccatgaagagagggactatatgttgtggtttttccgttcttagtccgagatcacacctctttagccttaacccgacgaagatgtgcagctgtagaccaagggaaatgaccaacgggaactattagaaaactgttattgatatcagaaatagccgcaaaggcattataccaagccgaagacgctgccaaaatgccaaaaataccgcctgtcctctcaagtgcaaccggaatctcgccatgagagttgcattgaatgtgcgcaatgccgagtagaaggtagttcatgtccatgaaaaagtacagagagaacatcgcaagattagatttgagagtgcacaagagcatcagtgtagtgaagatgcaccagccctgtatacatacatcgttctcagtatcttttcccatgatagtaaatcttgaatttgatggaattggcttaccaacatgaacaggcccattaagagctcgttctgacatagtggatctactgtacttcttgtaaaatcggtatcgtcgaaagtcgagatcagagaaaatgatatccaataggcaccgaaagaacaaaaggtcgtcgcaccaaaagtattcccagccgccatttccctactcttattagcactaggcaacacacaaagcaggataggacataccacattccagccaacacctgcgctataccaccataactcaaagccaaggacatactgacccctgctactttcatacctcccacattgagggcgacacaattcgagaggaacgatgtcaatgcaaatgcacatagacccaggggagcgggattggcaatggtccgaacgttaacaggcaaagactgaagttccagtttgcacaatggtataggtgtctccggaatatttgatgggggcggagagtaatcacggctggcttgagacaccactggggagccaatcttgtcctgcgtactcggctggatgtgatggtttgatgcagccttggttctttggaccgtagtgacggtaatagtatgctccatcaatattttatatgaccaaatgctggttttgtgttttcgggaagccgtttagaggaaattgaggaataatatggccagtgaacagagaagaagggcaatggagatacatatacatatatatatatatatatatatagtctaggacgtagatggtacatacctctagaaagagcactcgaccttggtactatcccccagtgcacaagcaagctacagccaaaccccgttgaaatcgaatgatttcaatattccggaggttcacaaaagtggagtcgatttctacggggtttgaactgtaatccctcttccgcatagagagcgtattggattccccgaatccgggaaatatatacggggaagtcgtcgggattcgaggattagcattagctaataagaagcctatactcgggtagtgccgcgagaaacgggagctctatggcatgtttcactcgatcatgagatattcaaagactgttcccacaataatagagcatcttgcacgctgtgcactgcttaaccaatttattacaaattgctagcacgggtcaataccgtcgggatcgaaactaagaagaattaccaattacttcctatatacggagtacatcgtaggtatatgtgtcgttaatgtggggatgataacttgcaagacgaccaacgcactagaactgggggtttggcgcttggctacaagaattgacttcaccaaagtgcagtgatacctgtaagatataatatttgagattcaccaaaatgtatatgcaggctatacctaggctaggagtgccatacaacattggaggaaatgctaggaagttctacttgctccggatgtcaaccatgttgaatctgccggaggcttgacttggctatatctatattttgcagagcctactcaggctcctgtgtaggcatcgctcggaatttcaacaaataattgctatccagacaaaaaaatctagattgggtatcctggcttttataaatccatcatattgcgccgcatgtcatgaggaaagaagcagaacccccatctcacgacatcattcccaaaacgccacaatgcctgtggtctggaaccaaaaaaaaaaaacaaaaaaaacaaaaacgaaaacaaaaacaaaaacaaaaacaaaaacaagaacaaattaaagtatatgcaagatcagcagggaaattccttacacatcccaaggcgcacaagccttcaaagtaccagagcttatgcccgccagccctgcacaaaatcgtgcaagcgatcaatcacaacaccaaatatagcattgacactgtctgcgataagttgctcgaagtggcggatggcttcttcctcggtcatctcgagatggaagcgctccttcactttcaggacggctttatcaggctccactcgaatatcagggatattggcatcaaccatcaaactgaagaggttaaggatcagattggcagatttccgcagcgtggtgtaagcagtgtagcagtactgcttgaactgcagatattggggcgaggttgtgccgcccatgccttcgaccatttccttgcaaagtttcatcatgggcgcaaaaggcttcggatcacgaccaaggatgaacccaaagtcagcgtggaagaagtggccatctggtgctagaagcaggttttcaagatgccggtcgccaacgccgaggaggtacgtgataacgcagtatcctgcacatgatttgacgtatgtatccattgcttctttgcgaacgccaagaggctcattgtcatctgggttgttggcttgtagataggcaaggatggatttatacttggcggacgccgcggagagagaaatcgaggggatgaattgcacggcgccggccgttgcgctggtggcaagaattcgataaggagtcagtttaagatcaaggttctccttctgcaaaaggcgatccatcaagatgatgatctggatgaccaattggtcctggcgaagatcatcaccgactttgaacagcatcggataacgacgaccttcagaagtcttgaacgtgataagcaaaggggaaagagtggacttgaagacgttggattcctcggggtataatccaaccactgaaacatcgggatctaaaggtaggggcagcgatggatctatgttgatcaggtcgttatcagggtcacggagatattttttcagcatctcaatcttgccgactctgttttcgcgtgcgaagcgtacgtccttggctattttggagagcacagccaccatttcaccttggcgtaatagtgtctttctgtgctcaggatgaagcttctccagttcaaccatgaagtagtattcaacccgcgcaaacagccgacgctgaattgcatcagcgtcatcaaattcgaccatgagataccagtgtaggtagttgccaagcttgaagttattagccgcacgcgaaatcaagaaatgtgcaagcgaggactcctgcggagccgcatcaggttggttatccggagttgcgtcatatttcagagcttgcaccaattgaagaagataaagaagcaattcctcgtcatctgccttccgcagtgtttccacagcatacgaacggaccgcaggattatcaaaggtgggaccaagaatctcaagagcgtcgtcgacgtcaatctcggtccatttagggaacatttcaacagcttgccgcgattctccaacatcccgccagttgactgatttgacgaattttgtcaatgccttcttctcgcgtgtaagatgatacctgaaacgccacacaagatccttctcttcagcggtgaggtcttgtgtcggttcataggagataatcatattgagatcatccctgatctttgggttgggcttcaggtcacgatccatgatgccggttcgatggctacggatcaaacgccggtgcttgtcctcacacgggtttccgatttgaccaacctccggatcataaatctgaatgatattatggggatcggcgtttgagattccaggtccaaaatgtacctccggaactggcttgagggtagcattggggtgaggaggtgcattttggggccaggaggaaatgggcggaggaggatactcgtgatcggcccacacaatgggatgatcaaagcgtggaaattcgacgtagaggtcgaaatactcatcttcaatgttctcttcgtcagagctatcatcctgatctttgacgtgtttcggatctttttgtagggctgcatgaagttcaagcgcgcgcttttgagccgcttcatctgcatttgtcttcagtttctccaactcccgaaagagcaattgatccatccagtccacacgtgggatctcccccatttcgtgtttcttgatcaagacttcgactcgttctagttccgcttcttcgggtgactgctgtgaaggatcacgggtattcggcttacgacgcttaggtggtaaaacagatggggtagaggttgtagcagagccgtctgcgtccttgtgtaaataaaccttgcacttttgtctgcccattttcaatttcccgtcttcatcaaacaaagtgattgtagttccaccgaatgggacgtgcgtaatcctatcagcagcgagtggggacatatcaacgatggtgattgcgagctgagaattacgctcggcatccttgatagacatgggcatctccaaccattcattccatacgcgggcagttttgaaggccttgtatttggtcttcatgggcacgcccaatggcttcgactccgaccatatctgagcggtcacatagagatcggaggcggggtcttggacggaggcaatatgccgcagctcggcatttttatctagaacggtgcatggaatcggcttctgctttccctctaacgaaccactatagatgtgccggcatgagaaaaagcccaatgcttaggaatgtggaacttacatcttgatgcgtattggtatgtccacttgagtggtcacggcaaaggtgaacgcttccatctctgttccccgtttggagagagcaacaggtcgctgcgtcatggccgataagcaacccgacgtggggaggtcacgtggaaggtctacgcgacgcgacaaggcgttcgcgatcactaaatggagccacacgtctttttcctctatgtatttcgaggtatactctttgtctaaattgggctaccgtgtatagttgtactcgattagttgcccacttttttctttgttaaactttctttgttcccactctcatatcatctcgcactgactgctgatcgagtatggcacgtctcattcacacaaatctggacgaagcaaacacccgaggtcccggcccaacatcatcaatatcaccagactcatctacttctgataaagaaaatcggtatcaaggtaataataagagaactaccgttgcgatgccaccgcatgcacagggtaaacgacggcggttaaccgaccacccctcaaatacccagtctgctcgatctgctcagtctgcccgatctgggcagtcgcaagcatcgtctcaacgaaccagcagtgacacacgatactatgaccctgatcaggaccccgatgaacggagaattgtacggaggggacttcgagagctgggtagggagctaaatggtaagttgctttggctggacttgagactcgggtaatggtgctctaacacgtccacgaagatacgcggggcgagctcatgcagcctgggaatgatggtatcctcaatatagttgaacaagcaaatcaattctacgccaaagtgaagcagaccgccgacgccacgctcgattcgcgcatcctggtcaacaccgccgatctaacgcacaaaaaagccactcagctcgctctcggcgacacctctgctggtattgatgtagacgagtttgtctctaagtgtgtatcgttcatgcgtcgcggcccaaacaatgcgacggcttcaacacagggacgccgagggcgtcttggtcgaagccaaagagaccccgatgccagtgacgaagatgatgatggtgatgcgatgaattgggacacgcttggccgatcggcctgctttcctagcaatgctcgtccggccgtgtccggatggttgctggggccgctgtcagtacagaagcgtacgcggcaaatgacacagcgaagagcagcagaggttattgatccgtcgcaagccgtggcacctcgagaaatggcacagcaggatcttggtcaacaggacagcacaaatctgacccagatctgttccgagatcaacaagctgcttgccacgaggcagcgtctcagtcagcatgcagttgagacagagcttcgcaacgaagtcaatctcacaacagagaaagcacaaaaaatcatggacaagcatagcgtagcggacgacggaggaattcctttgtttcgcttctgtatcaacccacattctttcgggcaaagtgtggaaaacttgttctacgtgagcttccttgtgcgagatggcacagtgggtgtacaaacagatagtcgtgatttgccgaccttgcgtgagtatttttcaacatgactggttgatacagcactaataggttgacagatgcgtccgcgccgttcgcccccagtgaggcccaaaagaaaggcgtgcaaaaacatcaggcggtttttagcctggaccatgatacgtggcacgaaatcatcgatgttttcaagattaaggactccatcatcccccaccgaaaagaggaggagcaagagactggcacaagttggtatgtctaagcttcttctgaagacacgattccacgagtcgatgtgtgttttgcaagatacccctagatcttttgacttgtatttctcgatgaatttaataatctagctttatactttgaatatgtcgtattctgtggcatctagcacaatcacgagtgcgacctgtaaagacacaaattggaaatccacaacgatagacctatactccttacttagataggatatatgcccgagatctatttcaaaatgtaagccacctatatgtacataactacggagtacataaatacggagctattaagacaacaactatgtaggcctggaaccctccagggctgcccaggcgggccgtaccaccgtccactctgacaaagcggataactaagctcaggttcataactacgtcattatcaggctgtctggcttcccagcgaacttctgaagactgatccctactcttcaattgtttaatatttaagaattgaaaatttctctaatttgttactgcaaggacttgaagatctgtagctccaagacacatcaactgagacatccaacgccagggaaaacacaaacaaaatcaggaaagccgccaaaatgccacagctctttccagccaacccttcggcgactatggtaattcgccatgtgacaccagatatcgtgaccatgagtcttccttttgcacggttcggacgcctgcagttcggcgggcgagggacattgggtgagtgccgactctacagagccaacctaccaggcgcatgatacacctggggacaggggatgatgtgcagtgatttcaagcccatgggggtccttgtttaagatctatgctgactgttcttgcatgcgacagtcaagcttgccagcggctccctcgcagtattctctcccgtcggcctaacgtctgaagtccgcgagacagtcgagtccctcggcggaaacgtcaaatacatcacggcgccagatatcgaacatcacctcaacctcaccccgtggaagaacacatacccacaagcagagatcctagctccggagggtctatacgagaagcgacaatcaaacccggaattcaaggataccccgttcaagcacgtattcaaaaaggaggatcaactgccacggtcgatctcgaaggagttcgatgccgagtttgagagcgagtatgtgtatggtcacgggtcgcgtgagctggtgtttttccataagcccacacgcacagtcatcgaggcggatctgctctttaacctgcccgctaaggagcagtattccaggactcccgaagccgggactaatttccttaccaagctgattatgccgctgttgtccaccaagccaccggctacatggcagaggcgatttgcatggtatattctctcgtcacaggatcgggcggcgttcactgagtctatgaaaaggattgatcagtgggactttgatcgtttgattccttgccatggtgatactatcgagactggcgctaaggggatatttcgtgatgtgatggcatggcacttggagcagaagaatacgtagtcttctttatcgaaactattgtaacagatgatactttcattttgactcgggtgttgtggatgggattgcattggtgtgattttctttttcggggacgttgtaggcagcattattccaaatttgatcttctctcttggctctccgaagtgggtatgtatactccatacatattctcattcttgtcgttgttgctattcatagtatccatggcccactgataggtcaaatagtaaactttgcatcgcccgcatctttctaggatcttcctgtatgtatacgaatgttcattgctgcctagttctgctatttccacttctcatacgtgaaatactacctactatgtagtgatattatactcataaaaaatcgtatgtttagctgtcaaatctccgtttccccacgtcatagggctgagaggaaaaagcaagtcagatgactcaaattaaacatgatgtcagaggtttaaaggtctctacgctccagcccctgtcacaaggtacggagtagagaacaacatccacctgtcagacagcaacaatgatcgccctgggtggagcccaacccaaatcccggaccaaactactctgtagagctatcggcaatagtcgctaggatcggcagtcgaagagcaagccacggaagtatacaaagtattccagcaaagaaaggcccgtattccatgccagcacatcgggtggttttctagcacggggaggctgggcctggggaagacaaggatgacgatatggttaatttggtcgaaactgcgtggccctaggctcgactttcgtggcatttccgtctgctgctttaaccagccacaatcatgtatgtatacagctcccatcattgagaggaaaatcttataacgccccctcagaatgaaaaccagcgcacatttcttctcaattttcttacgcgcattgggaccaatttgtttatccttcacatagttactaacttctcaaaatgactggtttgctccaggaaccgagccaaaactgacttcaagcgtcagaccgagaaatcggtttgtccggggacactttgcggagtccatcaagctgggattgaatctgatgacaaccctagctaggtacaacagagctcgatcctaggcaactatagcataccactatgatcagtgatacatagtatacatagtatagatgaatagactgagaaggctatcgaaagcattcaaacatgttgagcgttagttaatatgagttcgatggttagtggtgtaaagacaccacagtcaagaccttgacctgcctccgtacaacatcctgtattgagggtactgtacatgtacgccttcattttcctgatggctctgtagggctactccttacgccgatcgggtggcgattggcattcagccacagtccacatcagcggtcagtccaccacgaaaagccgatctcttacccattcaagcctggaaaacggttaggcacgttttgttcacaatttcgaccaatcgtgacctctgcttgttggaaagaactcgctgtacgaagtatacgagattgatctgacgacaccaggaggcttagattgactctattggtcgcgcctaatgcaagctgtgctttgtcttgaattttaattgaatttcctttttctaatttattgacttttcacttcgtcccttgctttaaaagacactgtcgctccctctcgaggtttgctcgtctgtgcaacctaacacgttatatagcttctcgcgttccctaacctcttatcccacaccatatcttcacgagcttgacacattatctccttatacaatcacatccttccgatttatgaaagaaactgctcattgatctgacaactcaaaaatgcccgtcatttcacgcctcgcgtctatcatcctccgcgttgcggagattgcctttgcagctgtgaatagccctgatcaagctcaacttattgaccgcatctgactctgttctaggtcgtcgcaggtgtcatcggacactaccttgcccaggttaaccacagcggcacagatattgactggtggcctcagtcgcgatggatctatactgaagtaatcgccggcttatcgatactgctgggcctcatatggctgatcccgttcgcgtcgggattcttctcctggcctcgtatgtgctggatatacctggtgaatatggagcaatacttactggaatatagtggacatcctcatttcatttgcttggttcgctgcattcggtgtcctcgtcgacaccatccgccgcctgccctgcggcagcatctggtcctggcactttagaggggaccagacatgtggtcgctggaaggcagctgaggctttcagcttcctttcagccattgtctggcttgcttctggtatcgtggtatgtgatgagatgatacaacccacatgtgaatacggactaagaaactctcaggggatctggttcaccttccgtgttcgccaaagcacctctgacggagtgtaagtaaccaatgacatcttctgataatagcttcttgattgattgatactgatatactgaacagtcgccgccgccgctggggtcgctccgccgtctagatgttagcatcggatcttcaaatatctgcatggcagacggtagtccgtcatacactaccgattatgcgcattgcgcctcccgttcagcacaggataagtgacatggatgttttaatgatattcttgcttctttgttttcctgctttcctctaatgtttctatgtttgcctcatgatctggaggtcaacgaattacgacttacgttgatacccttggtgagataatctattagtgattttgtgaaatccggctattgagtttgctgttctatcgctttttttcatctattcttaatatatttcttatttggacatcattgtctggattgtacagcagctacggacgttgccaatggttctttttacatccacacaccctcatctagtttccaattcccggcccaaataaataacaaagaacaacaaggccatttttctagatctatcagtccatgtgtttcatttttcgtctttgtcgtctttcttgttttcctttattagcttttttattcattcgaaataataatcttaacattgttggaagtgcaacgtacgaaagatataaatacgccaggtcgagccatgatacgttatccctcgagccgaagcagtttttgaccatccgttcttgaccttcgagttaggaattcatcttccctgatcagcgttgccacagccttctgctggcttcggatttctgctatcactgagaagccatgtcagtgatgctagacaccacttcggcccggctctttcataccacgcgcattggatttcaaacccgctgccagcaactcattgacgacttccttcacgatggcttatcgcttcaggatgaattccatgatagggttgatcagctccacctatcattggaacaacttaagcgagccggacagatgatggccattgattgttcgacaaatgagcttgtggctgttgtccctattggatttttcaccgtcctgatcgagcgtcctggccaggacccaatggccgaatttgattgggcctgtatttacaccactgacactttgaacatgctgacgagtgagtcttttttgcgccacagggcccccgctgatattgcccgcatcctcgagacgcagtcattcctctgggatttggttgtgccgtttcctgtaacgctttcctgtgccgaggattccgccccagacccatatgtgaatgctcttcagatcccccccgctgctagtctggctcgtatgaactctcagattccggtgaggcctcgccctactcctcctgttgacacttacatggcttacaaccggcccgtccctggtccttatccccctgctttgcctccacgatctgtgtttgagtcggagcccgagtcggatggtgagtcccctacaggcgctaacgctgtgggtctttatggaaaccccagcatgcatcctcggtgaactcttgttattcctgtgttgatttccatcattcccagtgttcgagaaccataggcacttttcgactttcagtagcaaaagtcttgatcaatgtattgagcttctcctgccagaactaatggatgcggtggaaggctaagccacccttgagataattgtcatcctgaagatgtttctatcaccagatcattccaattcttcgataggaagctgtagctgtccttcatcggtcctctgaacgtcactagaagttaggtggacggatttgggcatccaggagcagggtggcaggaccctatgcgagttgccgtacatggtgtggccagctcattagttatcaatcccctagtaatagccaagcgtccttgccaacatccgaagacagaacaccgaacaaaatagagggcttagtgagttgttacattctcgacattgtagatagtctagtccacccgtggagcatacatatttactgatgaacacgaaactgaaacaaaaatgaacgccggaaatcgagaccaaggaataaaagcttggcctttcaaataatatgagcaagcccgtggccagctgaaaagactagaccatccctttcccaaatgcaaataaacctcattaaaacatccctccgtaatcaatgttgcaactccgagcaggattagcctgctaaacataaaccaaaccctccctattcacaaaaagcccttggtgttgctgggttgccgctggggaatgtcattagatccatagacaccactcccgcgacggcttccagtatcactgaaggtcacaccacgcccaataacactgcctcgctcaacgcgcagggctttccagccctccagctcgcgttccagccgcaatgctttctcacgctcctcgcggagatctcgctcggcgcggcgggccagcagctgggcgtccgagtcattatgctgaatctcctcgatattgcgaaggagccgttcaatcttgtcccgagctctgttgacctcgtcagtcagctgagtgttcaccttgtctcgcctgtcaatctgggattggagatccttgacggtgcgatcaacattgcgaagagagcgctgctcggagctgtgcttgctttcctgttcttcgaggtgggtctcaagctgaacagcagggttagtacggaagtcacagagactgagcatgaagccatttgaacttacctccttgatccgcttatgcaagaagcgaacatcctggctaccagaggaataactcttggtttcgagatcgagacaccggagttgggcttccttcagctgcttctcaactgctgccttctccttgaagagctgagcattagcctcccgctcagcagtgacctccttctgcatttcagttgccagggcgtctgcacggcgcatctttccaaccgcggcggcagaaacatcttcctgctgcgcaattctagacttgagctcaagaagctcgcggtccatactggcagcgtttcgcatagatgggctttcacccttggcaaggtcctcaagtcggtcgcctgcttcggccaatcgaccttccagcatcttcttgtccttcagaagcatatcacgctctgcttgaacatcctcaatggaggtccgaagggtgcgcacctgggataggagtgagacaactttactctgagcctcgttgtgtgcgttgacagcttcgtcacgagaattggtgacatcttgcaggacaacatccatccgagatttttccttagcccatgttgagctattgagaacttcgttgtcccatttgctgcgaagattctccagctcctcacggagacgagaagtctctccacggccattgagaacacgctcacgttccatctcgagttcgttgttgagagtagagaattctctctggtacttttgtcgggtctgctccatggaggtctccttgtcctcgagatcaatcgctcgctggttgcggtaatcttcgagttcattctggagacgttgcttagcctgcaaggcaccttgaagttccgcagcttggtcctccatcctagcctcgagggactgtgcctgtcgctgcaagtcctcaacaagcgcatccatctccttgcgctcagacataatctgagcgcaggtttcttcggcttcttgcccttgggatttggcgaactgctcggcgcgggaagccttcataactgcaatttcggcctgctcgagtttgttgaagtattcatcggagcgactcttgtacaacatgaggcttgactccagatcagccgatctcgaagactcggcatctaggcgaatctggagatccgagaattcctgaagaagctggttacggctaactgcatcttgctctctgccgacttgcagctcttgggcctcggaaagggcatcacgaagttcaacctccaaggtggctctggcgcgcttcaacttttcgaactgagccttggcatcaccaaattcagtcatggtttcattgtgaaccttgaggagtgagcgcctagattgctcttgtgagttgataaggtcatatagttcttcgtgcgatttagcttgaacgtcgcgcagggacaattctccggagcggatgctacgttccaacgatgaaaccttcttggaagagtcgtcgagttggtcgtgaagacgaccattctctcgctcgagaagctgcatgcgacggattgacggactttcgtcctgccatatatcggcggtgggagtagagcgtccaagctggctctggaggtgcttgttttgcatctcagtcatctgaagcttattctgaagttcttccagttcagcggctgtatccatacgcctttgataggcctgtgtgtccactgttcggtcggacctcgcggagtcattcggtgcttcgaagacattgtagcgtcgattgggagtagtagggttagaatatttcttagcagcattttcggagttcttcctgaggtgagccggggtacggttgttggtcacttcgttttggtcgatctcctcgagcaaagcgcgcttagatgatgaatatttggcgtcgagctccttcatttcatccccatgacgtcggcgcatttcagcaagctggctctccgctcttgcgtacttctcctcggtaaccccaagcctgttttgaacagtttcaaggacttgggccagatcaactttcttagaaaggtgtggctgaacagcctcccaggattgagctggctcagtagcctcaggctcgaagaccttgtgtaataggatcaattggcggtgtaagtcctcgatctctttgttcgccctatcaagtgtgccctgggtttgacgggtattagcttgagcttgattgcgaagttgccgttcggtttcgagctttcgattggcctctgctagttgcaggttcgccgctgaagcagccttttcagcattacgactggttttgtgctcgcgattgacctcatgattcaaatcctccaaactcagcgacaacttctctttctgcttctccaaggatcttatcatgacctgcgagtcttccaactgacgactcaatctcttggtctcttcgtcgagcctggacttttccttttgaagggttgtcaaacggagtcgattattatcactggccttcgagtttgatcgggcaatatcaaggttcttttgctgaatcttcgtcaagagtgacttgttatcgttttcggatgcagtcagcctgcctctgagagtcacgagctctcgttcaagacgctccttgtgctgatcatgacgcagacggaagttttctgattcagagatcgagtgcatgagttcttgaatccgcgctgagagttgtgatcgttcagtctcaacttcttcaagctggcgagccttctcctcaaggtcctttcgtgaacttgtcatacgctcctcggcctggctcatgatttttcgttcaatctcagcctcggcattcatacgggcagtttcggcgtcggtgaacctctcgcggagcttgatcaattcgctttgcagttctttcttagttgtttccgctgtaactcgtgcctccgtagcgcgacgcaagctatcttgctggatgtacatctctttctcgatggtaatcttagagtcgttgagggtctcatatttctgagtcaacagtgcaagattgtgctcggaaagcatttgcacgtcatctcgtgactggcgttctcggctaaggtcggcttgagcctggaagagatggtgcttgagatcatttatttgttcctctagcagcttcctactctgtccagcctcggcatcctccgatctcttattctcaagcaaattcttgaggtccgcagcttcgcgttgaagttgcctctgttcggagcgcatggcatctctctccgcttgtacctcacgaagtttagattgcatgttgtcgtggcgtgccgcaagggaaattttttcggactcaatgcttctcttttcttcctcgtggatctgaacgtcgtttcgaagaactgcgatctcgctctcctttcgacgaagtagttcttcgtagctagtggaagtactcgagagttcggcaatctgatcacgaattgacctgttctcttcggtgacatcgcggatttgtttcttggatttatcgagttccttagaagtatttgcgagtttaatatcaagatcttgatcggtcttcaacaatttggcttccaggtcttgaagcttacgatctttcaagctgaggtggctttggagtatcttgatctcttggcccaattcttgaatttggaggtcttttccagagaactgagcctccgtttcagaaagcttgatatcgagttccttgactcgagaatgcagactgttcttttctgactcgagttgctggatgatcaaaccggcctgttccagctgggtaatccgaagttgcagctcgtcgtcaattttcctcttcgcaaagaccaattcatccagttgctcttcaaggccttcctggtctgcgattgcaccggaaagcttatcagcgagctccacttctcggtattgcagtcgcttgaaaatctcctccttgtccaatgcaagtgctcgctcactttccaaagtatgctgtatcttctgaatctcgatctcagtccggcgtctttcttcgtccagtttgttgcgttcggcaagatcctgtttcatcttgatttcgagttgctggatcttgtcgtcacgcttcttgacttccttcgcatttctcgtgtcccccagtagcggcttcatccttgaaaacatgcgccaccaagggctccccttcaaatctaggtaagcgtggaagttctgttgaataatcctggttgcctccgcgcggtagaggcgcttgttcgaaatgcggcgctggacaaatcctcgtgccagagattgaaacttagacatgatagttcggatgagttggtcacgtttctcttctaagtcggccagaacacctgctctgaagaaaactttggtgcggccaaccctgtaccagccccgatccataccaagctttgccaacatagtgcgagcaatagtctgtccctccaagtaccccttcggcatatcctggcaaagaacctcataacgctgtcggaactctgtgaacggcaagcggttcgggaatccagtacgagcgatcctgatcccttccaggacaccgttgcatcggagctgatccaagaccaatggagcgtgcagcatcttcggacgcttcttatgattaggtaggatacaacggacgaaatgagggtgggtcaggtggagctgagccatcaagctagatagctgctccttgtgtctttgggcaaccgtgcggaacaagcccttcttgacacgactcctgggatggttgccaccatcctcctctgagtctgcacagtcagagaacagatttgctacgtgtggtgctttcgaggcggccaacaggcgtgtaatattgtcgttgagcggatctttgttcttctcaagccaatcactcgtgttgtactcaacttccgcggcgtaatgcgtgagaatgaagccctggttgagacgagaggcgtggtactttggagtcttgcggtcccaaaggctatggagcttttcggtgaatgatttgtccgtagctttgggcatcacacaatcttcatcaagacaagagaaaatgccaatggggttggtcaattcgataaggtcgattgttggctgcaggtcctttccgaagtcgatgaattgccactcaatctgctccctcgcatattcttcttgctcaagaacaaacatatggtggttaaagaattgctgaagtttctcatttgtgtagttgatgcagagttgctcgaaactgttgttgtcgaaaatctcaaatccagcaatatcaaggaccccaatgaaatagttatcgtcgctagccattgagcgaccaagctggccattgattctagcgacaagatttccaaatccgcgctcatagattccctttgagagggcatccagggccatccggacctggtctggtgtctggaccttctccacccattcccggccggccttcacgcgtggatgcagaagacccttgacaaaagcttcggcctcaataccaagaaggtagcaagccttttccatgctggagtatccctcaggcgccagagttgcctggtctgctcgcatactcgccttcgcaacactcacatttcccagatgcagaacagcagcgatagtccgcaggatacagagctgatcctcgtcatcgaagttcatcacatggaaagcttcaatcaacgagttccattcttcctggtcagagacacctacgatagagtcatttccgtctctcgtataggcgaaatcctcgatctgaaggtccgctaggagaagcttctcgcgtgtttcacggtcagcgccctggagaagctgatagaaaacgtgatagtttctctcgttggggttaggcttgacgactcttgatttctcgagcagataccaatcgatcaaagctccagagatttggcctgcgcgagagaattcaatgcgaataaattttccgaaccgggaggagttgtgatttcggaccgtttgggcgttaccaaaggcttcgagaatagggttggctcgtagaatctgttgcgaaaggccggtgagttgcttcgctccggaacgaccataaggcgtatcagaagtggcgacagcagcgaggtactggatgaccttcttcgtattttcggtttttcctgctccagactctcctgttacaaggatgctttgattctgtccctcctcgacaagattccggaaagcctcatctgccatggcaaaaatatgaggtctggtctcctctctcccgcggcccttgtacattttgatgtactcattggtgtagattggtagtggacagtacgggttgattgtcactaggaagagtccagaatatgtctatacagtcaaaaagtcagttaaaatcacggatttgtgcattttcctgggcgtgacgaacatatattaggtctgactgatatctggtatgcaggttatgcaccacagacgcctcgttcagatgtgtgagttctgccatatcatctgccttgtcaaacttggcaggattgactttgtcgacctggtccgcgtctagttcttgttgctattctagtgtcagcgcattttatccttctcatgggatcacatccatacatcaccatcgtcggtctgcaccaacagtcgccctccttcaaattcttccagaaccagaccccggacaaaagccttttgagggtctcgtatccacacatatttgttcccagaaaagtcattatctccttcgagtccacgaatttgatccgcgccccgtcgtagttcctcagatttaatgaaacttggcgcaaatgttccggaggaaggactattctttgcggaattcgatcgctcgcgatttccacttagggataatgatggcgacaactgtgagacggacgtgttgcgcagatgacctctcgctgactccagcgcattcgatggtgtaatgatggccgatttaggccttgtatgtggggaatgtgttccttgtgaagacgatggccgtgcaaatagactggcacgctttggcgagccgttcagctgggagggaagcatggtgatcgtagttcaatgggacattatttgagcgtagggatcgttatcatagccaagattatttccacaatcacggtcgtaagtgtagtggaagtgagagtaggagggcactcgagagaggaggtgtcaaatagaatacaattaagagaggtgtgaagttggcaaaaagttggaagaaaagtaagatgttcgaagtgacgcacccgaatgtccatgctgtttgtttactctgcgttcctcgggcgcccgccgatctaaggtggcccgtgcgcgcgtcacgtgagatactcgatcatttttgtcgatgaaggcgcttagaccttaaaagacgaccgcgtatctcaattcttctcgagttcaacacctttattcatcattctctcgtcctataagcagaatccacagtcgtatggctctttcttgtttctaaatcgccatcagatcattatcacccctccacagtgactccaaattgaagttctgcgtatccttttcccaaagacctaccggtacctctccacctgtttaattcttcaagacaacatgagatttggtctttgaaattgcaacctttcttgaactccagcctctcgcttttgagaatcgtagagaatatatctctttcatccctgcacacaacatcatgtccgagcaacctccctcatacggtggccattcaagctatgcacagcaatggcctcctgcatacccttcgatgattcccgcgaactttcccagttcagagtatcctcaaatgcatcagccaacggcgacgaatcatgggccgaccttcgactataacatggcaagcgtcaatgcgaattcgcgagttccaggttcaaatggtgctggaaacttagcattcattccgcctcagttccccttcttcaaccacttcgatgcatcacaatttccacctcatttccctccaatgccgtttcctccgatgagctatccccctatgccaacagggtcctcacatccccccatgccgtatcatggtatagacggaaatgtcacacaccaactatcaacgccagctgtacatccgaaaaccgcccaggttcagccagataatcaccgcgaagaaggcgaagttagtgagggatctgatgaaaggtcactacaccctacgacacgcaaggctacgcgccagtattcggacctagaagaaggagaaactatatcttctagcgcgcagtccgttagaagtagtcagtcacgtattactcccatgattccccgtgttcagttatgttttactaataatggtgcagcatacgaccctcctttgtcagtctcagcagacccaagcttagttcaccgtgcgatgcagcctcagcggcaagacccacccgccactgtcccagcccctccacctcagaaatcggccgcgcagctacgaattcaggcccaaggcgctttgcttagcctggcgccacataatatccggtataatgaactggtcgctgagggcatcaaccctatgatcttgaaacgcctttacgaggaagtcggcatcaaggtcaccacatcatctgggcagtctccaccagttcctgagaaggcctccgccgtggctgcagttgccagcaaaggactgggaactaggaaaccagctgaggtgcccttgccagcgccccaaccttctgcccctcccgttgcccctcctgccaaagctggcaaacctctggagcgaaaggaacttatcgcccgcatgctagctgagaaagctgcgaaggtgacctccaaagaggcttcaccaaccggcagtgcaaagtcccaccctgcgatacaagttgatgaaccccgcccggttccaaaggaaacacttgtaaaggagaagagcaaagcccagacggagttggcaaggcagcgaattgaagaactcaaaaaacagactttactaaagacccagaaattggctcaggcaaatctgccgccgatccagttagaatctccagcgccagctatccaacacccgctccctcttcgacctcctgttcctgaatcccgtcgctctgctgggcttccaggactccttatgactggattggagcaggagccacatgaaactcttgccgctgagccggtccaacccataaacattgactcaacaccggtgtctcaagcaacccaacgcaagcgacctctagcttccgatttcgatgagccagttgcgcctacgaagaagcatttcaaccacgctgcgaataggttcgaccctactgataagctcatcattgcaattagcgacgatgaatcgctctacggtgatgatgaggacgatgacatggagttggattcgagctcagaacaggaacaagccccgatagtgacctcggctttggtcaagcctactatccaattaaatcctcctgtcacccgggcttcgacggctacaccacaagccccttctagtctaagtgaccaaggagacattcgacttaaagatatggaaattcaagctatgcgccgcaagattgcggagctggagctacgaaggaaatcgaagctcgctgccagtagagcccagtcacctcgcaccctagatgactctggggcatcatcatccagtggacaatccagtgggcaatcaagtggggtcgctgcttcttctgaagaaggtaaagttctttctatctcttttctctctctctctctctctctctctctctctctctctctctctctctcttgctatgacatgttcattctcaagtgctttcgagataaaactttgcgtttcaactaaccattattcagattcttcaaagacgaaaccgacaacggccgcacctgatatgattatgcccgttgcgccccttgcccaactggatgcactatccgaggccgctgccaaccgagaaccgctggaagaagcctttgctgaagaagtggcaaatggtgtaatcgatagcgccgcacagacatcggcttcattcgagtccgattctgctaggtcagctatgcaagaatctgatgatagcagcagtgatatttccgattcgtccagcgagagtgaggacgaacctactacctcgccagcgcaactcgatgtcgaccctgctactgtgccgtcattctcagagcctatggagattgactcttcagagcgatctgtatctcagagctctccctctgctatcacccaccctagtgccaattctgccgacgaacacgtttcccaaaatcagcttagcgaacaatctcagcgtgaactgtctgcggattccgacggttatgagcccccagagcctgatgctgacgcacagtctgagggctccagttacagccctcctccattcagtccagctatttccggtctcgtagaaaacacaggagtttcggcaccatcatttgacttggctcaagctgatgaaaaactaacaagcacacctcaggtgtcagactcattacgtcggtcggatttgcaggttggcgcttctggcgtatgaacactacccttctaaaaaaagtttttggtgaccccatactgacccctatctagactgaaacatcgtccgccatttcggagcaaagattcacgccgtacactagcccactgcgaaccttcaaggcttatcgataccacccgcattatgccgccgacgttccgagtggctaccgctcgctaacttacagtcataatatcgattccatgaaatacatgtgtccatatgagttggccgggggtgtctgcaatgaccgatcctgcgagtttcagcatcttcgggacatgactctaagcggtgcgtcgacatgaacaacgtgcaacaccccacctcgtcctcgagctcccccaccggcgtattgcactatctagtctgtttttactttctgtttattgctctactgccttcgtctctatctctgcctctacttccttcccactcattgccgtgtcctttttgccctgttcgaatgctgaccacagccgttaacctcgacagacgacaagattctcgtccagatgggctctgtccgagagggtcaaaccgaagaagaaaaagaaaaatatctcgctggtctgaaagagatcatcaacgacttacggcgtgacaaggtgaaagatttcaacactgtggcctccgagatagccgcataccgtaggcgcttcctccaagacccgtcgcgtgtcttgtccctgtaacattctcccaccctcattcattggaccctttcagtgtcctcttcaggtgagctgtcttctaccagtcttgtgaacaccaccatcgaagttctttcgatggtgggggaaaaacatcatcacaccacatggactcggacaatcctcatcatggccatgacgccatctacactattccatgccaccgcctctttttaggggtctcgcgttcatgacctggcttttcctctgcatcattagccgattcggcgttttcttccctgcattccaatgcatttgatctacgcgtttgggggctcgcggtctttggggtcacctttctttttccctttttttttttgttgaatctaggctcttgcctgcccattggacccgacaaaaacggtgttagggcatctgcatctcagctgctggtcgtaactttggcagtttcggcagtctctgctctgaggcaactctggctactgctaatctgccaccgaagggtgcggttgtaccattagaatctcggcagcttttcgcggaacatattcatagcaatcagtcaatatgtatttttttctatccaaccattgttctttttgtatcttcggtagtaatgaagtaagcatgacctcgcaactggcatagattgcgtatgagtaaaaacacgctaaaaccattaattcattcgattagaacatatcgtgaagtaaaatagaataaacccttcagctcagggaactccacaacccaaatatactgcagatgcatattttcagccgtgctcaactgagctgagaagagcaacaagaaaaaaaggtcaaatccaaaagccaaatccggaggaaatacccatttcccatacaaagtgagaaaaataagaacaagaaacaaaatgtgggttcctgcggctggtggatgctaagtatagcacgcagagtccggtcggggagatggggccagggctggtgtgacagtttcaagatttagatattcggagataataatagtaatagtcatagtgtacggagtcatagagtatggtatacggggtgatatttttaatattatctctcttctaatcaagaatgtaaccatgacatcctgtccctattccagaaacagatctatacgagttgactcaggacaaggcagatctagcggactaaatgtcttggattcgacagattcttgctgattggtccggggattcctcgttttcggttatgttcctcttcttgtatggacgtacggagtacatcgtaggttcatggccagcccgagatagatcacgcaccctgcgcccgagagtgaagtcagtgaccgggcgagcattgaaaacctaaggaaaatgccaagcgaaatgctagtaagcgggatgagttgtggatatggcagtaatctgcatctttaaggatttactgggatgacaagcgcgtccatagaaacctggaagggaacccaaacccgcggggcgcacagtccagcacagcctcaacgtcgagaagggaaagtaagtgcccaggtgggggctacgacaatgactaagttgggagctggatacggggagagtgggaataacatcatagagcatgccatagggggctgagtctgtgtcagagtagagacataagccctaaataataggtgaggactaaaagggtaacaaagatgcaaaggccaaagaagcggagaacaacggggaatagacttcgtttgtgttagcctccgagaaccaagaccgcttctctctgtatgagccatagggctgtttgctgcagatgccaggctcaaggagcggtaacaagaaaagaaaagaagctagttcatcctgacatgcatacaaagtacatcacttagcatatcggggtccattttcggctgagccgcaaatcatttcaaccaaccatgacaactggataattcgaggccgtgcttagaacagggggttgctgcacgccgtgaagatcacgatgactctacaccttggcatctaaggagaaaagaaatgtagtgatgatattgatgctgtatcaaaatgagatgagagtgaaaatcaaaatcaaaatcaaaatgaaaatggacaaggcagaacagcggagaatccagccccgctagcctcacgctaacccaaatcaggaacccgcaagtatacaaaattctagtctaacaaaacaaaaaaaaagagaagcatttacaccaggatatatgcccatgacccatgacccatgacccgctttgcacgctttgcataaaagcattccagaaagaaaaaaagaaaatcatccaaaaaaagcaacagagttcggaatcactatgccgagccgtcagcttcaggaatcaccgaaacgctgagtgagcatcggagtcacttaccattgtactcgtagtacccagtctcggcccgcaagatggcgtttcaaaaagtctcacttgatgcgcttgcactcgctgcaggcaatgtggctgcattgaacacactggggctgatggttgtagactttaggcccgtctccgcatccacagcagatgtacatgtaggtggcactgttgtacctcgtccctggtagtggtgttgttgagaggtctgtgtagtcggcacgccgtagaggccgtagaccagggaggtctggtacgactatgggcatggctgtggtcttcaatgttggtgtgcgaggagagtgcacggtaacagcagttgggtatgcagagactggattgcagtcgtgggagtgcgagtggacgctcatattgttggagaccttgtcacagatgcagcgagagcaacggggctttccacactcgatgcaggccatgtagagggcggaatcgtgaggaccaaacttgcagtcgcagcagtaccacaaaaaccccattgatgttatgggctggatgaatatggattgtattggtggccgagacagaatggaagactgggtggaaagcagagtgtccgattctttatagttgtagagcgggaaccgtgtctgaactgatacttggatgctaattgagtttgaaatggaattggatttcaagcctggggatcgtgaaagctatatacctcaagaatattagaatagatgtaacagaaccagaagcgcaaggcagcgttcctagaacagtcaacagcccaggctgccttgccagatccacatcgggttaagctaaattcattacccgggcagtaattggggcaatggatcaaagttgaccttagttgtacatcatccggcgagatgggttgcccaagagagtgtggcttagtgtaatccggggctgtcattgcccaggacaccacagttgcgcctagaatgtgaggaatctatgaatcatatctgaagaacaggtcttttgagtcaacgggcccactattccaggctaagcaaatgcccacaccgtctccaatggcctggcttaccccgagaatgtataggcgtcaacgggttctggtccctcgggtgcgccgaactaacggtctaccatcaggtcggatctcttttgggattgatgccttggtatgtaaatgatgttgatcaattggtttccaaggtgtgatatactccactccctcctagttttccaggcaccggctgcttcgaaaagcaaaacgaagagtcatcgagtcaggtgttgtcgcgcccttcgcagtgttgcctacgcaggctttctgacagcctctgaatatgaagaaaaatcagtttcatcattgtcgtttagggtattttttttcttacgattaacagattacgagatgctgtgaaacccgaaggctgatttctaatctaaattctcaccccgtgggcccgtagaaattccatgccgtgtgccttcctagatactatatcgagtcatatcgagtacaaccgtagcaccgtcgagatctaaaaagagattagagcatgaggtgatctgacattgctcaccaggccctatctgacggtcgcagctgagatctacagaattagcaatagtaggcccgacatttcccgtatcaacacggtagctgaggtcgttggtgaaaaggcaatatggggatgtttcaaggttctcccgatgccccgatccatgggacccccgaacgggcaacgaaccttgggaccccagggacacggacacccgggcgcctgggctccgattacgtcaggtttgcactgtttgcttcaacgacttccctgactcgatccgtccttgcaatccaccgaggtcatttagacatttattaaattcatgcatttcatattgctgtattgactccgtatttatggcgtctcccgcgcagaagcgcgtcaacgtcgtggtatccaggctcattccgcctgtgttactcggcgctgtcatatacgcttcttatgcggtcacgaaaccgttatccagtgagttttttgcgaattcggtcgcttttttaccaggaaactaacaatatgaaccccagtcgactatctaatccatcccttaccctcctataaccgaggcccacgagtcggcgctggcgccgcgatcatcgcgatctattacgtccttttaattcccatggtcgtttcttatatgcgactctattatcaagtcctgtggaatcccggataccttcccctcggtgaacaaaaattggccgatgacgaaagcataaagcaatcgaagcgccgtgggaagaaaggcacacgcaaagccgatccggagaagacaaaccaggcagacatggatgtggaaaggggctcaaactccactgctgtaggcaccgccgtgcagtcagatattgggttggagagcttctacactaaagatgtcttcgtctgccaggaggatggccggcccctatggtgcactacgtgctgtcagtacaagacagaccgggcgcaccactgccgcgaattaggtcgctgtgtgcgcaaaatggatcacttttgtccttggtatgatactccctgtgcacataccgcaaatcagtatccagctgacagaatgcagggttggaggtgtggtgtcggagacatccctcaaattcttcattcaattcgttgcttatactagcatattttgtacctttgttcttattgtgtccgcttattttacagcggagatccgacgccaggtaagacttccacgagccatatcaattctccgcttgttactgactttcgaccagaccccaggagcaaaccctcattggtgtgtctgtattggactgtaagtgcccacccacttgatactaggaattgagcaagtctgataaaaaccaggagcggccttttcgccttcttcaccgccggtatgacattgagctcagttcaaatgggcgtcgccaacatcacaacaatcgaaaacctaaatcggggcagcgtcgtctggaccctcgccatccgtgtcccagaatacctcctcgaacgactctgggcagccgagtccccctgggctccgacattccgcatggtctcctacccactacaaacatcatcgtctccaacccagctgcaaaccacaatcccctctccggacgaagacgtggttccgggcgaacgccacgtcttcgccatcctccatactttgccgggccagaatcccttcgacctaggcagttcattgaaaaatctccagcagatcatgggatacaatatcgtcgattggctgctgccgatcaagcagagtccgtgtgctgaccatagtagcatggagagttattttgccctgggtcccgtggtgacccgcttgcggcttgaggctggactaaccccgcccgaaaccggggctgttccgcaatccccacacccaggacgtaaccaccggcaacaatctcctagtgatcaatagttcggggcgcttagggtgcttcgtgcgtgttttggatactttataattaatgcaatgtatctccattaatgatgcactattggccggcctggctgtgttaggatgatttatattccgatagggtgatgccccctgccgggcaactgtatggctaaatgtcgtcgctatcacgtacaggcctcccaaggtcatagacatcttgatattagaaaggtgagccatgagatggcagacaaaccaaggttttccgcgaaaataacacgtttggagcgtttaactcggtgatctttactcaatataagtaaacaaatcctgacttataactattcataatcgatcatttagcgatcactaatattggaatgagagaacatatgaagtctgcatgtatgatatggcagctttatgtgtggtaaatgggatatatatatttggttattccagggtatcctccgattccagacaaataactaagtctctatatcctgcatcactcattagtattcgtatgtcccgtttggacagacagattgttgacatcagcgacacaatgttcaaacattatccaggatcagcacgagacaatcgtttacagtatatcgcctaacaccctaatatgccacaatgtcccgcgacaataaacaaacagaaacagaaaacataaaatgaaaaggcaagaaacgcacaaaaagagaggaagaaagagacgaaataaacgcaaacacaaccctaaaaccgcaaatctctatctcccacataatctatctccctagggaacaacctctgtgccacagaagtcgcattcaacatgggagcaaataggacatttcctctctggcgccaggttgggattgactaaattctggcacttgcagcacgtccaccattccggcaccagtctttgggcgcttgtcgacaggcattcgggtgtgggagtaagaacggatatggcatccgggaacggagccagagttgagtgtgcgtgagatgtcagcgtactgctcatggaatcggcataagaggaattgttaggccgggtgaagtgccatccgtgcgaaaaaggagttgaattctgtccttcactgttggtcccggtattcgaggatttgttggacatagcgttggacatggcgtgggcagatatagtggctttagtgtggaatagaagaattgattggcaaaggagatagtttgatctatgggggtttgatttgcgaggttctgaagcttttgaacgagttgattgaataagttgattgaaggagtgaaactgtagatttaggtatatcaagccaattgagtctgattgtatgagaagcagccatggaagactcactcttataatgcaaatggcacacacagacaccatgatcagggctctcattacagcacccaaggcccaggtatagaagctcacgcgaaacccgaggtgaacagaccagagtcaaacagccaaagagccacaactacagagtcgaaaccccagcatagggaacagaatacccagcgggcaaagaggcacagcaaacagcagccggcagtgtttaagcagcagtgaagcgaaagcgggaccagccagagcgagagaaacagcatggctccacgcccatatatttgatgtggaaggataacacgcttacaacctcatcatgacccgaacctctctagactacagtgtgtacctagtcataagttacatagtagttggctaactaagttagtcagtaaacatatgactaaaccatgtagatctctggtattcccggatcccgacgcaaaatatcacgccccggtgcccgggttgtgggttgctaggcgcaatgctggctgggcactacccgggtcgcgggtggatatgtagatatagggcttctattactcgatggccgggtggagtctatactataaaagctgggttattagaccttgaatggtagtacatagcccaaattggatcgtgtgggtttcttatgcggagtctgcgcctcggttggggcttctggttctcgttcctgcggtgtacgagggtgaatcggaatgggggattcgccctgctcagtgggctcggttcgcctgttcgcccttttcaatagcccttattcgttgctttgattattgtggatgacatatcccaaatatgtgcctttgtcaagatagtgcaatggatgtcatgtccagacaaagccctggatgtttaagcaagtcaaggccattttcgagttgcctaaaccgatcgatattagggtggttccatctatgacctcattcccatggagccaattcggccaattcggccaattgcacagcctctatactgtagattaattaagttgggagcaaatgttaggtataaaaaaagcataatccaggggatttatatccacgtttccccctcgagatttcaaaatacataactcacaactttccctttgcggctcaagtgagatcacaaagcacctgtggaccccatttctaaaacccacacatgtctcagattttgcccgaaacagaaatgaaagagagcattctttccgcctgtcggggttgtgttttgcatatgaagcaagggagtttcatagttaaagagcgggaacaacacatggcatccatggcatccatggttgacagcttcgagttcccaaggttcacgcctctagatccatggaatcagatttatatacatattcttatattattcttattttacatttgccttctctttcatctccagagtccacctgggcaacttccttcctcgcccactcagcccgggaaagccttggcgttattagtattactaaccttttgttcaacctgtggatccccaacccacttttgcgtcattgttcacacctttcgctttaacacacttctgaatcccctctttgattgttcagttgggcaactattgggctccaagcttcgtgtcaagttcggccccgactttctcgactttgtatcgaatcttcgcctccgagccaaccagttgggcatttctacatagcccgactcagattgtttaattactcagaatctcccgaagccgaccagagaacagaccgtcacacctgatttcaaccggccaagcattatcatctgcacccattgaatctacagttgcatatcgaaatgtcgagtcgctaccggaatctatctcccagccgagaccgacactccctgattgaacccatgagagcgtcaaccggaatggtagaactaaactccttctacgacccttatgatgcacccaggcgctccgactacgactacccgtccgatactggatactccagtgctttggggtaccggtcagggcgaccatcgaaactcgaagcttaccaaatatcctcccatcgagttcttgacccgagtgcgtccaccaaaaaacgtaccgaatacagcatccaaccccgcaataggcacagaagcaatacagcaacgacagcggactaccatacaccagttcgtctggccgtaccttccgcatctgttcaacatatctcgccggtgcgccactcaattcagcgccgtagcccgagtcctctggctacagattccggccatcacatagtctcggcttcccctcggaaccccgcacatcgccggatctatagcaccgactatgcgagcgacacgggctatatggatctacggaatgatcccagacctaggactgatcatagtggtcatcaacaccgtgtccatccgcctcgtgcagtacgccagccagcgtacgatgggctaaggaaaggtgatgacatcgatgactttgatgcctattcatacaccaacgctcgtgagcaattcgaccgggactacccggtcaagccccgtcatcgcgggccgagatactcgcccgatcggccgctcagttacactggcgtggaagaaagccctcaggggaaatcgcggaaagaccgtcaccgtggcccacccccgacatcctggggccttgacaagctcgggcgtgaacggccgcgaagctcaacacacggcaaggataatcgggacccgcacagatcgaaggatggatttcatgatcaagccctggtcgccgtacctcaagactctgatagcgaatacccttctcgtcacgaggagcggcgccgtcgtgtccacagagcacgccacgtgaacgatcgggagcaccactatccagaagaccaccatctcaagccacatgatgtcggcacggtcgctaatgtaggacttgggacagcggccttaggaggcgcatactccgacttgtcggactacgaaccgcatcgttcgtcgcggcggaagcacagacgctcgcacggtggccatgatgccgtccagcccccatcgcgggagctggtagcagcagttccagccgatgaaagaaccaagcaagcctacctggaccctgccgatgcccatcgccacggtcgatcgcggcgatcctccagccggcgggcgcacagcaatgacgccgggacatcggacgaagacctgcaaaactacaggcgtgagcccgcacgtcgcacgcacagcagcaccgacactgaaagcgaccgggaccgctcgcgccatagagaccgagaccactcccgcgggcaccgctctcgctcccgccgcacgttggagaatggcaacgagcacatggccaaagatgaccccagaagacttattgctgttgatccacctgctccaaaggagccagagggtcctcccaaaggaattctcaagcctccgcgcccggcattcccagaggaacccaatccggtgagggagggggtcgctcccctcaaagatgctcacaagcaggggatcccgccaggagctcgctggacgaagatcgaccgacggctcgtgaatcccgaggcattacaaatgggcaatgagcggttcgaggagcggtcggattatgtgattgtgttgagggttttgagcaaggaggagatccagctgtatgctgtgaagacacaggagatcagaggtaagttacgctgctgtgtatatcctgaaatcacatttgaagtagaatactcaccattattgcatagatacccgacacaaggaacagctgcgcgagagacgcaagtccagagatgagcatcaacgccacggccgccgaggcgacgagtcctccagcgacgacgaggacgagggcgaggaagagccctggaagcagctcgaagcagcccctgcaccatccgcacagaatatgtccttgccgtcgcgcccacgcgcgtcgaccaactcaatgcaggaggctgaaaggcctcgggtgaacaattcgtctgctgcaccggcataggaaaatctttcgatagctcgggatttgcatatccttcgcaaggcctgggactagaacctagtccgttgagaccaaaatggcgttcgcgaagtgtacaggggcgaggaattcgtttgttttcatgttggctttaacaaatgcacctatccttctgggacgaagaccatgcgacaagcccctgcaggcaaaagcaagtacccgtccaatttacgcgccacccactgtactccgtacaaacgcatctcagactcgagtcgtctctttcctcttccaggttatttcaacttacaccgcctccacaaccatcaatgactgcattgtatgcactccgtacgcacctgtcatattggttgacaggacgcccaagatcaacaacgcctgcgtatgcagcccaacacgccgctgggttctctccgatccaatcaggcccccatcttccattccggaacccaacgatgatcaatcgctaggcaccgacgcccgcatctatagtcatctattggactgaatacaacgaacaatagtctggcgtcgagtcgtgcggctcggacggatcgccgtgtccttcccttttctttcgtcttctgtgtcactcacatattcctggatcagtccatacagtggggtctgcagatgtagtcatatcattacattatctcgaggaagagaagataactagtatagttgaagctaggcttctctacttctgaatatttacttctttcgttggttggtatgtgcagagagcacaagagcgctaaggaaatacaagccaagcgccctttctcaaagcgcaggagggggaaatgtcaagcaaaaagcaaataagagccacacctgcgaatgcaattgtgtgaagatgcaatgttttctttttttccttttttttctttttttctttctctttcattttctacatttgaagtagtgtctgtctaccattccaccagggatcatccaacagcgtctaaatccaaacccttcctattgcatgtctgatcgtcgaaaaagaaaacaaactactagtcccagtgaggaaacagacagaaaagcagaagtaaaatggggaggcatttactccctagattatcgtagttgcataggggctgcaggttctaggcatacgccactagcaaagatttaggctcttgtcggatttcaccgacgctcttctggtgatagcggggatatcgattggttattaacattataatgaagcataaaatcgcacatctaactacagacttcttaacgggttcatactgtgcgggagtatccggagtaaagcaaatacttccaagttcatactgtaccttgtacatatttagtcaagattatatgttgtaaacaatattaaatgaattacccctcccatgtttgttcgaggtcgtcccacctacttccccttgctgtagttgcaatttgcccagtgaatagtaatagaacagtaagagcagaatatagggatggacgtatggagtactccgtactaagggttacaatccttagtactacaggtatgtacgcattgcatcctagcatcgatgactgtattagtgttggttaagtactcatagccttttcattccgtatagcgtacacgagcgcctgcccaaacggttatagcaaagttaatggatattggatcacgtcggagacattctcatcacatcggtgtcaaagtcgccgagattatgggtggtatacaaagtatatgtctgtagtatgcgtcatttagtatgcctcatgtaaacaacaactaaaggccaaggctaaagctaagaagcattgtacatagtatgtcgtatagcgtcattgctatgctgcatactggagtatacgattcacggtatacgatgtagtttccattgccgtgcaagcggtctgtggatgtaaaatcacatccgattcgaggaaccgagatctatcgaggtaaccaaccgcccgagcgttgactgaatggacgagccatctagcgcgagtcatgggtgtggcgaggggtgggggaaacgggatctcacttggatgaagcgaactctgggtaatagcgtatgatatatgatagctaagctaccgagtcttggtcgatctcgatatgaatcaaatcaaggaagatggagagctggtttggctcagagcttgactggcgggaaggatcttgttattacaatcaattgctttattgtccatatacagtgcttacctccgtcttgaagatgaaacctaaaggaacttgctgatccctaacacgatctcctaacgtcacgacgcgatttttaatttctaatcctatccttgtttttttttttttcgattactccgcaactccgtattccatatggagtatctccggactgagtatgatatcagtccaatcgttaactaactagttactttagtagaaattttttatattgcattgacgccttcgtcttcaacatagtacaaaaatcaagattggctgactaggtgtaagtgcaaccatcccgaactcgtccaagatcgtcgtggcacatgggggcaaaaaagtaaaaagcaaatataaacgcgctcacttgacccccctacctccgcctccgcctctcgacatcttgacacatctgaccttgacccccgattgtgtcattggattatcaatgcggccggggagaaggactgaattagttgcgatctactctggacccccggcagtgatccagtgcttatcaccaacggagtatacctgggcttattataggaggaaaagaacaaattcgttttcgggttactatcattgcctggggctctgacgttagatacgtgggatatctacgatcagcgattgaatgttgcattgcgtagacagttctgttcattcggtgtgatttccaggcataggaccggtgtgtgtatgtatggtaattatcatcgccatctctgcacagcctccgggatttccgtgtcttttcactgatagtaaaaaatttcaatttttggcattttcccacgcactcccagcctcaagatagcacagggagagatctgaaacaattcgctccggccacgcgacgggttaccgcgcccacatgcaggtttaacacatccctccacatgggatggctcacaaagatttagtttgcggtgagaactaacttttgggtattttggcttttgcttatggttcggctagaaactgtttcgaaagatatatgtgagagacggactgaaactgatatattaactatgaccacatattgcagtcggaaccggaattgtgaaatacggaatatggatgtatttaccacctttgcccgttgcatttccattggacgcaaatgatacaatcgctacaccaaatccgatcagggcccccgggttacgattccccgattgcccccagcggcttttggcggctggggccggagaacggagtaggccggtgtgataaccttcaacttatgccggacttgcctacacaaaagtcagagacgcgagacagctcggctaaaaataataataaatacctcatcccacgttctaagctctattcttcggatccggatggtggggccgttaaacgatccatcgactactgaggtagtatgtatgtcgcgtctacggtggatgcttgagataatagtgcgaagtacggagtacaggtacacaatatacaataatctacagtgggaacgaggtcgtagagagccaatgcaacatattcgagttgtgcattcttttggacttttggagggggggttatcatttcctcttctcggcgctcatcccgcttggtccgaagggggggccatatccgtcttagggcgatccgatccggagtgcggagaatgttttattctttttattcttttatttttattctcattgactataaggaaggaaaggaaaaaagatataagcattaattataggctgattcttcaagggtataaagacgttacaagccctggggcagatcattgcagattaagcagactaagcagggtggtcaatatgcgcatagatggaagaccggggtgtgccaactttaatttggcagttgaatcccggtcgaaaaaggagaaagcctttagcctgggcacctcggcatctggacatcgatggatccacgcagccaaacgtaaccatgggcgcccgccaagcggctaagactatcaagacttgaagctgactccctggctcgccgctccgtccagctcaacccgcgatctactagattgtggcttgtcgcccctcaattgccccatgtctattggtgtacccatgtttccatttccatgctcggccgagcgttgatattgagtaaccggacataccggtatcgaaatcttcccggtttccgatcaggacgtatctccccggaattcggaatggctggttcatacaggaaaatttcaaatttgagctagctggaggtaggtctggaggtgaagggagacagctcgtctgcattgctgtagctgcaagaagcaagggttacacctggccaacgtggacgtccggagtctgcttcttcaaacttggttttgcatgatcattctatcattcttgtcgatcaaaagaatcgagcaattaagtaaaagatcacggatgactcgtgccgtatttctatctccgggtttctagcccggcggatgaataaaaccttcgtacagaggaaatacctgctctatctatttccagcaggcccatgggtgtcggcgctagatggcgcgtttgaactatgatatgcacatactatccacagacagcagtagctcgagtcagtgtgctgcttagttcaagccccttgatgacaaagtgcctgcaaaccccgggcccagtttcctcttgctggatcgggtttagggcgtaggtctcccgcataagagatgacaatctcacatacaaacggtgttactctctcgccttcgcacaggccacctggggtctttgctttgtctatccgaacatgacgtactctcccatggatcggcaagcgatcgagaccgacggagaccggcgagaaacgaaattgaatccacactttagcgaggttcctacccgtctcgacaaatagggagcttcgccatttaaaagagctaacaatgctctggaccactcccagtcgatagtcgatccggggcggtagtggcacagtttagagcaaaaaggggccaggattgtcggttgatccgcccaggggtttgccctgtggttcgtccccgatagcgtccccggtcagccccagccacttggcgagtgacaccgtgtgtaacaggtagtgtcaggtggctggttaagctcgtctcatgtttggtttgaattgagatattgaggaataggagaaataaaaataaaagtagtagatctaaacagtacctcatgccatatccaagcctgcatagaccatgtgggtcagcacaatttccttgaagcttggagactccaaaattaccgtgtgggactgcgggtacggcttaacggaagaccgcgggatcatcgatcacagcccacgccaatagcaggccgctggtggaaatgggcaccgtttcttagccctaaaaaatgagaaaagaaaggggcgcaaccgtgcacaggattttagctccaaccttcagggctgagtccttgagttcctgagagattaggtgtgtctcgaacactcaatccccatacttcgatccattgagcaggatgctattggttctaaccctggtttttccgtgtctttattgtatagctgaatggaccacctacgggctatcccgattctggtagcactctcaaaggagtatagacaggtttgaattttcttttcttgccttttcttttggatttttattattgtgcattgcccagtaaacctccgaggttggatttctgtacgcccatcatttcaccttcatgcaaagtcactgcgcaacaatcgacacgatgctttcccctttctgttgatcaaatcaacgcacattgtagacttgcatacggagtactccgtactccgaaggtgagagcctcatgggccagttacccgccccttggtcatgggagaacacaaatgaaaagacaaactcaaatcctcgatatcaaacttaacatccattgttaccatggacggttaccgttattaactccgaggacgcccaataacctccgagaatcgtccttgagcactcgtgccgggaggtctccacccccgaggtattccgtacaaagaagggtacaaatgacaagggtagcagagtataaaaaataattaaacctaagagccaccttatagaaaacgggtgcctaggcattaatttagcgtttcggccatttcacatgaagcacaggggccaaaaaccaaaatgcttgaaaggatttgtatgttgtagtgacatgcatcggccggtgtcagagaccggagaaaattgggagaaggttaaggcttgcatctatcttttctttctttttttttcttttctccctctctgcgcttttgatttaatctttttcttgaaccacagctgattaaaaattgccaaggttgactaagatgccactagagaagtttcgggatagagcgaacccgggtgctggcccgcattgtgaatctcaactcgattggctattattacgacggaacgatggctcttctagcgttagcgtccaaaagagggactcgatcgtgcgtcgttctgggatgggtatatcagagggaggtttttttttataaatctctgtcaagcagcgtggccgactccgttcggagaactagttcgtgagatcgacagggttacactcccacgaactcagcccagagagagagaaaatactaaatgggcgccgttaggctgtttcgagtttatttggatggagagctgagttttctctttagacaattgggccgtggaaagaagcagctgagaggtcggtgtaacttactagtacgcgtctttaaaagaaggaaattgatttcctttttttattcattcatttactcttttcacgtattattccgccgatcttcgatatactccgacgagaatttctcagcccaagccgtacctgaaactggcctctgcacgatccgagagcaacgtcaactagctttcttttttagcctcgagtccatcctgaggtccacacttcaatctgcatgggtcaagtacatattctagactttgtggtgggtcgatgatattcgatttaacgtcagggcaaacggatgggtaacttgtatgttgaagtacttgtacaatgtgtacaacgtcgacagtcaaattggccttgtatatacggaataagttatagtagagaggaaggaaaaagctctcttccttctattattctagaggctacggagtatagagagtctataggatatctccctgacaatcaccatccacctgaatctcaggcctcaagagtgatcttatttacactttgcaacatataaaatcaattacataccccaatggacgtatcacgatcgctccatcggatccgagcagtccaagccgttgcaaatcccctggccctaactctgtatagattcactccccactggaaagcatgccgtagcacatcctttccccacttgcacgtctctttgtctgcacatcatccccaagcgtctatctctcgatttctctctttgatctcggctagcctgatgacacatttaatttccaagaggctcggatgtttaccggactcgaggcaacctcctgcatccatcctggtcattattacacctttcccgctagttaccagatcctgatacgctttgctcttggacgtcttcctttttttttctaaattggttttccttattgggcttttattctttttttgcatttctccattttcctctttctttccttttttttccttttttctttctttcttcgtttctttttctctctttttcccaaggcccttttattcgagctcgaggtttgtcttcgaaaggagtaagatgagaatggagatgggtgcagctagataaacgaccctggaccctccacttgccttcacattgacacggtcccctgaaccccagtcacctagtgtgtcgcgcagctttctgtttagcctcagttcgggatcgcccgcgtggttcttacatttttaatttttcttttccactttctcccaaaaggcaccccatcccagttctttcttctccatcttgtactcttttccaagtttgcaagattctgtcctgggccgtgagagaggtcgttcatgaccggcatggtacagcccgaccttggtcctccagcgacgaagtacaaggaagattcgattgatgatcccgtgagtatcatttctattggtatctttttcctttccagttcccgtctaccctatagatttttttgtgagatctttcctacttcaatatcattcctatctttcttggtcatttatatgtggttgccagctctatgtccagtggggttatctcttctctcgactatctctcttccgtcaacctggatcttgtgggagcaccatggtcaataccccaaccagacagccttcaactcaggatgccaaaactgatcgatttggggcctgttggccatgacctaaggagtttgtcccgtttatatctcttctggacccacgaaagccctgctctgactagagcctcactacgaagaaaatgtttcaattgagaggagcaacggaaaacaatgcccaaagtccgtgtatctgcatgatccagcttcgagtgctgtgtcccccggaagaaaaaagaaaaagaaactcccactcgtgatatcaaggacacaccaacgctacacagatccatgctattctttagttctggacggactatcccggctataccctggcgcaattgttacgcacctaaggctagccctgttcgaggatttccattgatctggggcccaacccaaccccccacctctatgatgagattctgcatacctgcaagattcaaattcccacgctagaccggaggggtcatatgctgatgtcactctggatacgtctggtcgtgtttacaagtttcctttctttctttcctacgtccatgttctcagcttgtagcaccgtgcattttttggctcgaatcttgcttgtcgtatctttctggcatcctttcggggctggctatcaaagttccagtcactgatgtgtatttctgctacagcttcgacacggcaactctgggcgttcgggttctcaacagcctcaatctcgatcaaatctagctcaaccacagaagcaaggccctgcctcgcctgttcagccctctcgctctcttccgcctaccacatatcctcccccaccccatcaattaggaaacgaagttctccatcataatcactacggaccgcctcctcaagagtcgccctactacaccacccattcttcctatacatcgaccccggcgtcggcacattacccttctagtggtaagccagttctttttagcagtgggaaatcgttgcgttgagaagtgacgcacctgtgcttggctttctgacgcccttggcccatttaattcttattaaagacatcaactaatctttaggattagggccacctgacctcatggcctctaccgctcaaatgcagagaccttatccctctatctaccacacccctcaatcaagctcaccagcctcggtagcttctcagtcacatgaacaacatggccgcaacatgtactcgtcaccccagatgccgccacagatgtttggctatcctccatactcgcccatgaacccagttcagcccccatacggggcccaccattctccccaacagcatcctacaacacagccattgatgatgcctcctcagaaagctccatcccaagggccaccacaccaatccccccacctccctacgtccggcatgtccagcagccccatcatgaaactcgatacctcccaccccagttcttcaaagcaatcgatgctgaaccctccccacacggcaaccagcagccaccacatgtctgctagtaatccccacgcaaccccatcactaggcggcagcacctccagcgcagcaccaggccccatcccagccactaccccactggtcgtgcgacaagacagcaacggcgtgcagtggatcgcctttgaatattcccgagaccgggtgaaaacggaatacaccatccgctgtgacgtggaatccgtcatcgtggacacgctcacgcaagaattcaaaaccgagaactgcgtgtacccgcgggcctgctgcagtaaagaccagtatcgcgggaaccgactggtctacgagacagaatgcaacgctgtcggctgggcgttggccgagttgaatcccgcgctgaggggaaagcgtggattgatccagcgtgctgtcgatagctggcgcaacagcaatcaggacccgagactgcgcagcagacgggttcgccgtatggctaagattaatcgaagacagtcggttcccgcccagtctcatatgccgcagcaaggcccggttggtccatctggtccgcctggtccgggcatgaatgctatgccggctcctgttccccgtccgaatttgggtcctatgtcgatgggcccgccgcagatgcatcatcatcatcaacctgatggtaatcctaatgaggaagttagcggtatgtttcaccacatgtgatgtactttgtgctttcggtgttttcctttcttttttaattttcaatagcggcggctcactcccgtattctcttctggggctttttttggaccgggtctatgtgtgtatgtgtatatggggagttttgtgtcttgtcaggtcccatctgtgtgtgtgaggattgtcaacggttgtatgagatgtgtactctctcttgtatccctgcctggtccgcctgtgttcttatatgttctattccataccctgttcaacttcactactttgtcaccttttatcatttgacaccgcgcttcttgtgctttggctcttcttttcttggaactgaacctcttccccgacatggttgtacagcgtaggctaattatcccaacacccataggcacagaatacccaggccaccgaagcatggacacacgcctcccacagccctcaattcccgacctccgccccgtccacatcttccacgacaccccaacaaccctaaccccaagcggcagctccagtggcccctctatgccccctctactgcgcgacaacaacctcacctcactaagccgccacaccatcgccaccgctgcccgcatcggctcaaccaaccacgacatcgacgagcaaggcccaaccaacgaagatctcttcagccacctcccagacggcaaacgccgcaaattcatcctagtcgatgacccgcagcgcggctgccgcgtccgcgtcaaggtcgtcctggacaaagtcaacatggacgagatcccagactcctaccgcgagtccaacgccgtctatccgcgcacctacttcccgatccagatgcgcgacgagaaccgtgtgatccccgccaagcgattctttcgcgatgacgccgagcaggcggatgaccccgaatcatcgactgtgggtcgcacgaccgtgcccgcgccgtcgctcgacgccgacgctgaaattgacgtgccgaagatctcccgcagaaaacaccacaaggagttgatgcttaatgacctcggctaccgtatgagctggagtcagagccgtgtgtttgcgggacggatcttattcttgcagcgatcgtgtgagtgtctacgtctatttgttttttttttttttttctagttttcgtcttttaattcccactgggggatttctattttcgacatccacacgtgcttgtgatcaatccatggatttgatctgacgacgactgagacatgtgagacatatgagacaccgctaaccgtttgcgaatagtggatgcctaccgtgataaaatgcgaagtagtatgatcgctgcgggccaggacgccacggatatcccggatcatttcgatactcgtcggggcaagcgacggttcctggagcgtgggtgtcgggagtcggagaattctgcacagcggagtgcggaggaggttgaagggtgacgagatgatttctaatattttcatttttcttctttttttattagttctgtgttttttctgcctttttttggtttgtttatatcgtttccggccgaggtatgcgacaagggcgttgacggtttgcggaaaaacagccaaattccaaaaacaggcaaaagggagatatgattgatatgatctggatatgcctcagatgataccacgactttgattcacgttgaatgagacatgtgtgtttatatagagaaatgagttgacagttgacagtgttgacactgacgttggccgaagataaaaatagcaacgcaagggactcacatccactgtaatccacatgggaccctggaagaccctggaaaagaaccctgcgatgatggaatgtatactctgtaaccacgttcacgtcaacggggagaatagaaagacgaatcatagcaatataataaaataagtattccatagccctggaattctcattcagcgtggtaaatcgaagctttccccgttgtcccggccaacgcctttatttatcccgacctttgtactctcgacttcgtctcttctctctacatttcttgtttattgtctttttggagagattcgaaatcccttggtgtgaattcggcggaattcagctgcattcagtctaaatttctgccttggcaccttccctgcatttttctccgttcgcgggattccttcaccctcagttctttattattcaaagtccggtccacccggacacttctccttccaaatgtcagactcagacaccccactacctccaacccatcgttataaccacgcctctcgtgagaaccaaaccatcacacccggcatggacaatctcggtcccagctcgccgggcggtggcatcagcggcatcgccctaggaatcgccaatacacacagtcgccaaagcggcatcgacgcatctcgcggcatagacgacggcttcactggccccgccgagcgcgagtatcacacaaccggctcagacacaccctacgtgccctcaccttatgccggcccggactcgtttcctgccgaacaccacgcattaaatatggcgagaggcggcgcgctggcctcgcccgctttgcagacgcccagtcagtcgtcggtgcagctgagcgatcccgcacacagcccgtacccataccccccgacttattcgggcatcactgatgggccctatcagcgacattcaaccgcgtacagcaatggtgagatgacgaatattaaccccgatgagatcgtcgatgatggcgatgaggactttgggcccccgcggagtcgagctgcgcctgctgctgcgggtgccgctggtggcgccgcgactggtggcattctgactggattgtttgggcgagagaagaatgttgatgttgcgtatgactcggttcctggtggtggggtggagagcggaggagcctcggggagatcacagagtaacggaatagacgggcgcaagaagatgggctggattgttggtcttgttcttgggtttgtgattctgggtgccatcatcggtggtgcggtgggcggtacaattggcagccatcatcacgcgaaccagtcgaaggttgctgccggtagttcagacactgctaccggtgatgtgaagaccaatggggaccttggcaaggattccgctgagatcaaggccttgatgaacaacaccaatctccacaaggtcttccctggaatggactacacaccgtggggcgtgcagtatccggactgtttgaaatggcctccgtcgcagaataatatcacccgtgacatggctgtcctgtcgcagttgactaatacagtgcgtctttacggtacggactgcaatcagactgaaatggttcttcatgccattgatcgcctcgagctgaaggatatcaaactttggctcggcgtctggattgactcgaacaccaccacgactcaacgccagatcacgcacctctacaagctcttggacgacaccaaagacacatccatctataagggtatcattgtcggcaacgaagccctcttccgtgccggctctagcaagcagtctgccgagacgaccttgatctcgtatatcagaaacgtcacaaaggaggtcaagaagcgcaacctggatctattgattgccacctccgaccttggtgataactggaatgctgagttagtggaggaggtggatgtcgtcatgtccaacgtccatcccttcttcgccggtgtcaacgtcgatgttgctgctgcgtggacatgggatttctggcagacccacgatgtggacttgaccaagggcacgaacaaaacgcaggtcatttcagaggtcggatggcccagtggcggcggcaaagactgcggtgatagctcggtctgcgacgacgacacgcctggttctgtcgccagcatcgagaacatgaacactttcatggccgactggatctgcccggcgctggaaaacggaactgattatttctggtatgtcttgctcactgtccattggtctattcaaattactaacactctacaggttcgaggcattcgacgaaccatggaaaatccagttcaacacgcccgggaaggaatgggaggataaatggggtctgatggactcggcacgcaagctcaagacaggtatcaagatcccagactgcgatggcaagacggcctcgtaacgtgctgtccgatccagccctggctctcttatggaatcatgatcacgaaatgttctcttatctgcataagtattgtgttcttagtctgaattgttttctgctcactggcgtttgtctttctctgataccattcatcacaagggaaccctcgaacatctcacctctcatcctcacacctttcctcgattttcaccttttccacttcgaatcaaaatctcggggttcccttcctggcggtccatcatccttccttcctgtctttttttcatctgcagtctttaccaattgctactcttcttcgagccatgcttgattctaccttgcatatcttctttggtgctgtccattcctttcattcccatttatgaggatggtcttcgacccatgttttcggtggaaatttgtcttcatgggatattcacaggggtcatttgcgcttgtgtttgcccgcctagctccatgtatatcatataccagctcccctcggcctccgtgtacatattaggtcaattcatcaatctcggtttacctggaattacctgtaaaaaatatcatatccacttgctttcttcattgatcattctcttcttttcctgcaaggaagccctcaggtattattgtacagaatataggaataagacaatagaagtggaacataaggtctataaatgaacaaagagggcagactgactattcagaataactaggatagaaagtgcctacctattggctagcacttctgcaaatgctgcgaacaacaaacccctcacttagctagcaaacaatttggtaaataagagaaagaataaacaaaagaacaaagaaagaaacatatatgtgctgaggatctgtagagtcaatgcagagcgtaacaaacaagacaataatagaagtagattcataagtaggaaggaacctcgagaaagaaaaagtcctcagaaagatcttcagataacagagagctatctcggtttaaaggttccaaaaattagaacggagatgagaacagaaatccttttgttaagctcctgacggacaatagagaactcggaaaagtacggtctgtatccgcagagatcagacggagggtttccgccgtaacatgcttcgtgcccttagaccaggaccgaagccccagcctcgtttcagccttagatgagccgcggcaaagttcctatcagagtcttcaggatttcccttcactggacaacagcagacgtatatttccgaatctgaagctgaagaaagttcaaaaaattgaaagggtactcaacaggaacacgatgtgcaatgtggactggagtggtgtggagaagaaagcaagaagaaaagagaggggggggggggtttatacctccccgggggcttgaggaaatttgggaattggggttggtgacgatttttgaccgaaagggaaggcacctgatcaggacggtacgtggaacgtgggtacttcgactagtgggaaggtgcaaacgggtaggaagatcatgatatttaactccagaaatacaccaacgccaatccaatgcataccaattctataacctcatgcatctttcatgaaccaaaatgcccaaaacactaatacacatatcattctgcaccaacgacctcctcgacccaatagagcctcgtattccaaaacgcatgctcaagtgcttcaaacaccggcaaacaatacgactcagccccatccacatagccttgtagtacaccaccagagtccgcatgctcgagcgggccaccgaacaacaaccacggcttcgacggcagcagcaattcaagatgtttgcgttctgcgccgggacagaagagcagtgtgtttgctgtgatatgcgagaaggcctctgggtgtttgatgacatttatgttcagggctgcgaggagggattcgtctaatgtgttgaagacagggtcttgtgcgtagacttttatatccgaggaggtggtgcctgtgctgtggttagcgtgggatactgtaaacgtaaatggagacagtcaaagcaaagaagaagaccagaagtggaccatccaaaggatcgggaaacggacaagcaacttgatccttaatactcgccagggcagcaagttgataaagcgacacggagcgccgatcaacccatccatcacgcaagaacccactcgggctcccaagcccaatacagacaacggcgtcaacagggcaacgggctgggatggaagaaggagcagtatcagcatcagatgaagaagaggctttttctcccgccctcctcagccgttcatccaaaacgcccgtcaacttagtccaactctccgaaccctcccagcgctcacgatgagttcgaaactgcgcctgcagctcatttagcgtgagtcgacccggtgcctctgcgggagtcaggacgggttcttcaggctggtcagaggagatcccagtcccggattctttgactgctgttgtgcctcgcgggcgtgtgcgcattacgcgccgcacgtttccgccgctcgcgacatgggtccagccgtcgtcgtcggtcacttgggttcgtttttgggttgggcgtttcggtcgggaagggtgggatgtatggggcatatttttatataagtatacttatataaataatgtggattttggacgaattgggatattgtatagggttggatttattgaagcttttttttggagatgcgggggaaatgcttggcaggactccaacaggcttagtaagtagactggccccgagaagttactccgtactgagggtgagatagaactacatattcgggtgaaatagtgaaatgctttgcaggaaaaagtccaacaatccagaacttaacctatgggcgcactcagccactctgtaagcgctcaagttgtttccccgaacgttagcgtccccctcggcgcttccaccgctggtcgctcagcaaatcatcatgcagtattcaccctttgagtgatggcacttgcagcggattgtgatgatcccaggctacccctgctcttcgtcactcctcgagccagtcatagatgcctcgccatgcagtctcggtcacatctgccttccagggttttgactcgtccgcccagtgaaggccagtcagtacccctcaaaaagaccacttagccctcgaaaatcatgttttggtcttggtcttggagtttctatgattttggtgtccatttactattaccgttgccctccctattatctgcttttattctgcgatcggagaaatcgagtctgagtctcggcgacagctgaataattcctcaactcgtgcaacttgtcaccgtcgctgtatctcaccatgaatttcacacaatccatctcgcgatgggcttccgtcctactcctgctgtgcttgggtctggcgcacgcccataccgtcattacttaccctggctatcgcggaaacaatctccacaccaacggcaccatcgagcaagctaacggtcttggtgttgcctacgatgcgaagaatggctcatacatctacccatacggcatggagtggatttatccatgtaagcaagacctatctacccgtctagatatcaatcactgactcgtttttcaaggcggtggtatgcccaggtcgaccaaccgaactaagtggcccgtcagcggcggtgctgtcgccttccagccgggctggttcccaggccatgccactgccctgatctacgtcaatctcggcttcggcgaaatcccggaaaatatgagccaccccgtcgtcccgcccttcctcatcgtcggcccgaccaacaatccttaccccgggactgtgtgtctgccacaggtgcctctgccggccaatatcaccgtcagcccgggtgactacgccacaatccagctggttgagacggccaagcacggcgcttctctattcaatgtatgttccagtcccctcgttccgacccggcaatcaatatactgactttctagtgcgtggacattgagttcgcagaagatggcgatgcgtctgtggagacggtcactcgcgacaattgcttcaattcgtccgatatcagcttcgagtacatgtacaccaccagttccattggttcgggtgcggcgatgctacatccgaaactgtcggctgcggctgtcgtcccgcttttgctggctgttgcctttggcgtctacatgtagatatgtcgggctttctttatcgcattttcgcgcgctccttgttttgtccttctttgcgccatacccctggttttcattggtctctgacgcttcgacatcggtgttgactacatgtccatgtctttctggaatggactatataattgatgttctgggtattctggcgttgactggtgtcttgactctttctttaattctactgaacgaatatacttgtccaatttgttgacgaatttgtggagtaggcacttattcattcaggtgacgcaatcccaattccaaggctgagttttgagatgacttgacctcaccatgccgacattgactcatatgatgtacctccccttgacgaaaactaacgttattgattcaccccatccaggcctatctttccttttgatttcaatctctcgagacattcaagatgtccacagccccatatttatacggagaaccactccaaaaggctttacctagaaaaatccggagatatcgcctcacttcaaaaacaccgaatattcctctggttgaacgtataccaaaactcaaaccgtgctgatatgatgggctattacggacggaacttgcacttcgagagaacactcaacgcgagatggctttgagagagaatatcgagggactcctcagggcacctaccactcccaagctagcgactcgcatccaggttcagtacttgcagatcaagatttcagatctttccaaggaatattggaggttaggacgggagtggtggaagattagaacttcgtttatggatggcccgttgaaggaatcgattattgacgcgcgcaaccaaaatggtatatgcatggtgtgctttgcgacgattgtgctgggaggggaggttgctgtgtcagagactgcggatgctgctatcgtcgcggtgggaaacagttttcggttggccattgcacagtggaatgttcctgctgtgagaaggatcggggtttcaaactcgacaaaaaaagaaaaacctcggtttcgggaggatttcaagactggcggcccttcttattttcgaatcagggatgctgctttacttgggctgatgaatggtagctggaagaacccgtcggatcatattcgagatttaccaccgaaatacatgtcgtgaaattgaaaaagaatatatatgtttgctcaatactccgtactctgaatctcctttgagaaatgtcccttggaaaggaagcttatggtgggtgttggttgacagtctggaccttcccgattaggaccgacgtacatatgtagtgttctttaattgttcattccccgccaccctcgacagtattaaactcgtaccttaaaaaaacctatattcctcaacaatcacaatatgtgggtggtttgaaatagagcgaaaaaaaacgaccactatgagattcgaactcacaatctcccgatgacactataaactaggagtcgggtgccttaaccattaggccaagcggccatccgtccttttggatccacacctatttatcatattgttggaggcctaggtggtgttaaataaatcccggcccttacattgttattacacgtcggatttctttaattctgacacttctactttaattttaaacgggtatgaactatagattggttcgttatattgagtttgaaatcccaatactcatactaacatcttataggctgtttcatgagggattagagtattcctgtctgaggagtcagagcctgacatttttctagtcttaaattagcagaacgaacgctattcttttcttctcggaatgtcatatactaggtacagatttaaaatgagaccgaaaggactctagaaagacatataaagcatatatttcgcaactaatcatgtcgatctaaggtgtagctaaagaatgagggaacataatctcttcatagtgtcatagctggaaggacaagtagctataaaagtacctccaggagcaagaataacagtacggagtagacatgacgggcttatcactctataatgtagcttctatctaatcatttcatactcttcggtgatatacgtgaatgttgcggcgaccaggagaagtagttcagagctaccaacagggacacttaataagaagcagagagctaagttaggcaatggatgaatttatttagaagattcataactacattatgactagacactcagacattctgtagccatcgcccacgtgatgaccctactctgcttaactctcatataaattcttaacatatttccatattggcttgtctaagttagctctcgtttttcaatcaatacttggaacaatcgactgatgcctcatcaaatcacgtgggttgttgtaacgtgaagttctttccttggacgacatcgcttcttgtcatccgacaccgtcacctaaccaacaccatatcaaatcagtacctgcaccacgctgttatggggttcatgagcgccatgcctcatatcaagtccgacacggagaaaagatatgagccttgtcaagtgttatttgaccaccaagttgcctgcgtcgtctggttcaaagatactcttcaccactatggtgtccccacagtcatgttcgagctttatgtccttgtacaagatattgacgaggcggcagaattgcttgttagcgctggatgggtcattgattcagaagagccacttacagttgggagtgcggaggtggaactcccacagaggcggcttgtttctccgactactcagacaacaactgttcttcttccggctcaagagtagaaatattccctggcagtcgactcactaagtgacgatgcgccgttgacagcggagtcatcaccggagaatatctttttcccaccactaccaggcttcctggatgcactgattgagagctggctagactgtccttatgaggatggtatgttgccgattcatttgacctgtcaaatctccaatctgtacgactatgtacccgctctaaaagaacgatcattcgccgaacgaatgaaatatcaacaccgccagttccacttcgacgggttggcgggaatgcggacaggcaccatcccattcagaaagcatgaacgtgtaactcgagatgcattattgcagggccagtatgaactacgggaatgttcggcgtttcatgataatgaagaccttcttgatacagggaggggtatatccttgtgaataattactatagaacttcccatcgtctagcgcttcagatgcaaaagtctttgttgattatcacggggattcagattgatatgcgaagacacggagaaacccatgaataagactaagctgacctacaaggtagttacagtcgattcgattatatacaagcaaaatctaacctacactcacatgatatatcgcccaatagaggaaataatataatctccagcaacaccagcgcaacaggcttgttattcttagcataacatttactacttgacttgcaagatataacagacattagatcatattgtgctccctcttgaccaagtatatgaaaaaagaaaagtcccaaaacggctaaaacgacacaacatttcgttttagagctcaccgggtcataataagggaccgagctggagatataaaagaacgacaataatacagggtgggaaggaaaaacgagggtatcatggaagcgaacaactccaatgggccacaccgaagtagaagaagaagaagaagtgtaagagggagtacaatacccagttgcaggtcaagttttccaaggagagcgagaaagcgagagaagcggaatacaggccacagccaagataaagggagaaacaaagaaaaggatgagccaaaggaagcaaaccaaagggtgtatatcagtcattagagattagatataatcgaagatggaatcaggtcttgaaggcaagacaatagtagccatcgtaggccgcaagtctatcctcacagaaaagggcgaaaagacaaagagggaggaatataaagagggaattaaaaggcgcttggacagaacgtgaaacacagtgtttgttcaatcgcctgactcaaaaggaaggttaaacgaagtcaattcaggcggcgacatatgatcaatcgcgcagcccgaatgccttccgaagaaggggaaatcgtttctttcgtcccgacccagcgatcacgacgtcgcgcgccgaaatcttattgtcatcggggttcgtgatttcaggggtggtgtcaattttcggatctggtctgtcgcggggtgcctcggtctctttcggagtcggagatgcacagtgagtggcattgccattgacaatgacgcttccattgtgtgctgcacctgcaccatcaatcggcggtgcggaatcctgcgtccggagaacagacgacggggcgctgtgtggctgttccacgactacctggagaggctcttcttccttgccattggggtggaggggccaagagtctggtcctgtcgaccggcgttgagaatttctcttcaccaacttggacggacgagtcggctccgaatttccggcagacacggtggttgttgtgacgccgtggttcccattcaccatgccctcgttgcgtaattgatcgaggtccatacgcgaccgctctaggggtgtctctcttcgcgaggagctttcaacttcagcttcgggaactctatggtcagagttcttgggtttcttgatgccaagtcgggcaaggagtcctggcttccgactacggggaggcgtcataatgaactcctccaagtccctctgcgacatgccacgtcgtttggccacagctgccattccagacatactgattccattctttccgcgggaacctggcgaagagggcactggctgggatgcaaaaactggtggcgcttgctgctgagggctttcttctgaactatcgtccaactctgttgagtcaccgtcgtcggcaccttggcgacgtgggataccgcggacagggcgtaacttattgtttccaagctcatcttcatcgctggaatctgcgaatcgactggtgaagacctggggccgagcttcatcctcgtcatctgaattttcgaaccgagttggacgcgccgtcttagggggcgccttggtgaacttcgctctcggcggtgccttcttgtttgtcgagaagaacgaatatcgctcagctccagtaggtcctcgaagagtcttccgcattgtcccattcgaggagccggatgaaagaggacgatgttcaaggggagagtcgttgcgctgcgttggcgattggacgcggacgttagtactagcagcaccggctctcagtgtccgtcgcatggaatggcgatctccgcgcggagaagtgcgtttgaagctgctggaggaatcacttccatttgacaattgccggcgcagagtgacagggatacctgtttgtcctcctacattctggaaattcggagtaatggacagagacagtggacgcggtttagccttgccacctcgcggagaagtatcgttgcttggccgccgaggatcctgcatactagacgtgccattcacatccaccgacacggcccgggttcgcgttggaggctgtgcttgaagactgccatgttgagcggtggcgttgcgagtttccaactggagtggccctggcgggtttgcaaaaccaaatccatggccaacagaagaagcaggggattgctctaccaggcggttgaccgaggttggagtcggtgtcacggagcgctcctcctcaagtgcttgatctgtcacatcttgtgactgactatccacgatggcggctcgaccgataggcctcggtgtagcgtcccgagattcacttgcattctcctcggtcggcgccgacctaggggctgaccggctgtcgacaatagcattgatggacccaaagccatcaccgtccatgtcttccatatcttccgctgcatcgctgtagacgctatcaccggactcctcctcagtatccacgtcttccggatttggaacggggctcgccgcggcctggggtctagtcttcttcgcagtcgaattgagactgcggtctgagttggagggagggaacccgcccggaatcctatactggtccatgctagatctcttcttgtcaacactgtgccaagttccatctgccgggggcgtagccggctcgacagcaatagcaggcacagacaattccgagcgcatgctggagtacggctgtttctcaatgacgtcatccgtgactatggtctctcctttggcccctggcttggtatacaaattcggagtatgcgaagtgcggttgacagacaactgctccagaacgctcaagctgtgtggccggaagtattcatttgagagcgacatatccggccttggtgccacatcagatgcagacgaagagctggactcattgtcactgaaatctgggattggcgacctcttgagggcaccgcctcgggtcccccgaatgctaccgaaagatggaagaacttgccggggttttatgactacatcccagtcatcgtcactcgtaaactccgcgtgcgacttctttttgccaacaccaagccaacccatacgagatttggctttaccgccgggcggggaatcaggcgtatagtcttccggcgaggtaggagggctggctggtacattgacaacctcagcctcatcatcgaaactgaccttgacagactttttccgggtatcaatccgggatccttcgtctgaagccactgatgtaccatctgacagctcgctcggtggtaggacgcggccagttggcccaagcctcctatcaggcgataaagaggttcctcttgagtgtttcaaggctgatttgacaggagatactgatctgagtggaggctcgtgaacttgatcaccggctccagctacagagagcaatctggaaaaacgtgcagttcgacctgggctgcttgactgacggtgtggctgctttatttgcagttccgacgagggcgatgagggcactggcgctgactctacgtgatcagtagttggcgatgcactcgtcatccggtttctgctttgccgttcagaggtatcttcgacattcgtattgtcttcgggctcttcttcttcccgaacagtggatggccaccgctcaggaagagctcgtgaggatgggtgttcagcttctacgttagccacaacaggcaccgcgctaccggtatattggtccagagaatcgggctctataagcgaattgtgaaccttcccagttcgaccattcgcactcggcctgttcatgggcacgccaaccgattgggcagtagcatctgcggtgccagccaaaggaacatgtttgcttacaacagggctttcctctagactgccagatcgctgtgctttaggcttcccctttggcaatttgtcagatacctcagcaatcgattcttgaatagcatcgtgaaggctcatcggattgctctcagacatcgtcatcggcgaggtaggtcgcgaacccattgggtatgagaaattcactgaattccgactcgtcgaccgttccatttctggaacggtcccaagactagtcacccgttgatacgtggttggctgaatcggaggccctcgcccatgttcccgatccacacccctcaccccagagcgcggcgaagacgatggggaggaacgcatcgacggctccatactcaccgctcgtcggttcggcagtttccgcggcgaaaacttcgtcgggagagtaggtaacggaggcacatcgacgggaatggcccctggcccgacgggtccggagctggtagctgggcgatggggggattggtcgcgaaaggtgcgtgcgctcatcgaactattactgctggagcggcgcagcgtggcactcacgctggccgagcggcgaccgttaacggggttggcctgcgactggatcgaggtgcgccgctggaccattcgttttgtctgcacattttcaatgggggtcggggtgggtgtgcagttgcggagcgctgttgccgccgcggcggaggacaagctgactgtggagggttgggattttaagaatgcatggctggcggcggactgggcagagtgcgcggcaggtgtggagagtggctgggaaaaggagtcgtcagtttcattttcatgcataggttgcaggtacccgttggattgcatcaggcgctgcagcgggacccatctgcagatagggagatctgctattcttggtagaacacacctgatgatgggcagaggcacttctcttgcgacgcccgaagaccattgttcagagtcttgggccttgtagggatcgaaggggtcaaagatcggatggccggacactgctcggtgcagcgccgggatccgaaattgaagtggatgaagggatgtggatctccagatgattatacgagggtagctatagcaagaagtggaaactagaaaactgagaagttgaggggaaacaactcgggagggatcgaccaagtcagagagccagtcagaaacaaggagatatgaaggtggcacgaggtaaggagagctgtaaaaaaaggcagaaagcaggaaaaaaaagataaaaagccgttcgagacagatccaggaagatccgagatcgagaggaacttgcgtcatgactctgatgggtcaggcaccagaacttggtttaccgccttggtggaccacgttttatggggtatgacctcggtttgtgtacagcatacctagattcattcttatatccctgacacggcatatatctcactcatccaacccacatatattcaatcctaacaatggcccttccacccctccccctccccgcaggcgtaacaagccgcaacattcaaacaaacgatctaaacatccacatcctagaagccggccaaaccccagagaacaataaaccattgattatccttctccacggtttcccagaaatcgcctactcatggcgccgcgtgatcccaaaactagcagcagccggcttctacgtcgtagccccagaccagcgcggcttcggccgcaccacaggctgggacacgcgcggctatgaagacgtcgacctggcaaccttctcactatccatgctggtgcgggatattgtgcttcttgcacacgcactaggctaccgttctgtccggtgcgtcgccggccacgactgcggcgctgtatcagcagccgcgtgcgccctaatacggccggatttcttccagagcgttgccctcatgagccatccgtttaacggggccccggatctaccgtttaacacggcgaatgcggatgccgcgactgggtctgagacggcggcggcaggtggggcgggtggtgcggaggggtcggctgctgcggcggggattcatgacgcgcttgcggaactcgggcgcaagcattataagtggtattactcgactaagcaggctggtcctgaaatgtcggatctggagcctgacgagatgcatcgcttcttgcgaggatactttcatctgaagagtggttcgtggctggggaaccggccacatccgcttgggaagtggtctgctgctgacctggtcaagttacccgggtactatatcatgccgttgaatgagacgatgcctggaacggtggcgcatgatatggagcatgagccgtccggcggtctggcctcgcactcttggctgccggatgaagagctcgcagtttatgccgctgaatatagccgcacgggcttccagggtgggttgaattggtaccgtgttcgcaccgctgctaggggccggtatacgaaggactttgatgtctttgctgggaagaagctcgagccgccttgcgcttatgtctcgggcaagctggactggggcaactatcaggagcccggtgctattgagaagatgaagaacgggatttcgtgtgctgacctgcgtgtctttcggcttgtggatggggttgggcattggacgccccaggaaagtccggacgaggtgacgcgcgcgattctggacctgatcggaggtgtgcgcgactagattcttaatcgatgctattgggcaattacgcttttctcgattcccatttggaactgtgaaagaggggtttgagagatatgatgacgttatgatgggctatgagctgaacaaactggatacattgcatttgcgctcacaaatatagagaaagccctagagcaattaatgatgaccgggagctgaagaaccttagaacctcgtctctttggacaaccaattgctgattgtctccagtgtcctcaaaggcaagatcgcaaggatgctagagtccaaagcctctccatcatcccctttgaaaacttactgagcgacgttacgtccatcttggggttgcgaactagtattcgcttcgtgacgtcatccgaagatcgcacattggcaataatcagcattgggttgccacaaatggccccaagaacatacttgatcagttgataattgcagactccagatggaagcctttcccccggagatagatgcttttcaacgtaccgcgagttgtttgcgttcaggtatgccgttttagtcagaacgtgtacagctcggcgatatcagaacctcagcagggtgagggggagcttggttgtatgaatttaaaacccaattttgagcaaattggaagggacgtctactatagaaagagaaatattttatgtcttcatattatatgactcattcttcgactcatatggcggctagcattttctatagaatctgatccctacgatactgaatacattcaaaatatgcttttatatatctctactctgaagtctaaagagtcatattcgccagatgacgtgatataccccgtagacagcaattggtcagagaatagattgaattggatacttgcttgtatcaacattgttgaccagtaacaggtgaatagacctatcaaatttcgaccagggaatggaaacatccggtctccgcggtgtgtgcatgcgcccgaggctcccttttcttgacctctcgcttgtcggttgcactccgtcgggggatcgaagcaaggctattagcatatttagcaacagcgaaagcggtagccttcgaattaatcaggaatgcttcgtggttgagattcttgaagttgtccccgacagcatggtaattcacatcgtaggatacgtttgcttggcctccgaacagttttgcctctgcttcggtcttgaggccttcagcgccagtgaaaagtccaccggcgggaattccacgagagatgaaaccctcgtagtcggatcggccattaaactcagtaggaacatagggcagcttctttgacctgaaatatttctcaaacaaagcctcaatctgggcagatcccgctggtccagtctggttgaaggcatctccgtcaccatcgtagatcatgagcgcatagttgggcgaggcaatcatatcgaagttgaggtagagtctgatttttgctagttcatctgcgtccaggtgggaggtgtaatactcgctacccaacaggccgaactcctcagccgtccagaagaggaatctcacggcattcttgacagagaatcgcgtcaacgcctttgccaccacgaggttgctaatgattccagagccatcatcattgatgcctgggccggcatcgactgagtcggtgtgacctcccagtgagacgacgttattgtgatcaccgccctttgtctctgcaattacgttgaatgtagtgcgattctcgacccggctgtccagtaaaagagacacagtcacagcgcccttctctgctgcactgagcaggaccttgccgtcgacatcagaaactcccgcgatggcggaataatcactggatacgccacccagggttccactaagagaccctgcaacgttgttatagacaattaccgcagcggcattggcagcagcagcaagtaacgacttttctgcgaaagtgcattctccacgctggactagggcaattgcaccagccacgtcactcgggtagtctgatgcactgcatccgagattcgagaccactgccagctctgcagtaacctccacgctaggactgtaggtcatggccgatgctttgatagactcgccctcaagcgtcagcgaggtatttgcagtagtccatgtgtgcacctgcggctgcttccacacattgtaatagccggtcttcttcaactcgcgatagatgaagtcaacagtatcgttgtgtgctgcactgccaaagacgcgattacgctcggggtacgcataggcgaaatcctcaagctgttgggtgcccttcaggaggtctttcagtcgaatggtagagggaaagtcattctaataagtcagattacctaaacgacggcggagatccaacatgtatacataccggtgaaacaaggggcttcctccggccagcttcagccaggcccacggacagggttatcaagaaaagccacttcatcgttaagtaatgcgcggattgatgaccattctgagccaggggcagatgtgattttatacccattcttcgtattgtcggcgaccatcacgcgatgataaagcgcaatggtgcgtgattggcagggccccgatggatacgccaagaggccggcttgcttcacttggcagaggaggaagcactttcatagggccggctattgtcctgcaggcggaatccgacggcccttggtatgacaaaggctgaggttaccttgccaaggcattgaggtgggaaggtactagggatagataacattgttgcgggctgttgcgctcattatccagcacattgagccttaagactaattatttagtccgtattcgcaatatatttgccatgatctgttgattaggattgtaatcgtaccataatcagattcagacggccgtgggctaactcagccaactgcctattagagatcagcgttgcggagtactggaatcgtgcctaattcatatccaccttggaaacgcctatctcaatcatatcgtcctaattcataaccgggcatttaaattcaggttcaaatgcattcttcggagttccacttccgtatgagtattacacgaagggtattcgttccgcgtatagcaggctcatctgcagttgtgggaaagagctacccccgcggaatgaagtaattgaatcgcttggggaaagcgcggatcatgagtgagaagatgagaccataggcagcaggtatgagtggctctctttagagcaggaaactgcttgacaccgcataaaacgcttgcagataactatcatcggcgaggacatcccgaggtctttccgctgacgcaataagcgctggtaactaaggtatccagcactccatgagcctccgctgagccaaagcctgttctctacgcacaacatggtctgcctacgtccgtacaccgccgcttcctaagatggaagaggctatttcgcaaacgcccttgaatcacctaggacacatcttcctcctctaaccaatgtcgctcgatgatatcctcctagagtgcagaactatacctacggtctactctctcgtgttacccggctcttcatcgtctggaagcaattcatttccctcgtcagtttcgcatattcgctgtgggcctgttggtatctcggctactccgtggcggaccttgtcgtgagatgcaatgccgcgaacaacttcagtgctgagtgggttgatggtagataatcgcataacccaatttgggtcgaggcctctcgaccccagactcaacccggacccagtgactggggccccagaaaacccagtttggacccagtttggacccagtttgatccattttttgcataaattaggtcttggcgttcataaacctgctaaaccagcagaattacacacattattagcgtgtttgtatagtttgtagtccaatttggctccagaaccagcactgagttatgcggaaacatagttcgaaagggagcactggtgtaagtcataccgctgtagggtatacctaagtaagttggaggggaagttgatagtaataaccttggaagcattcagagacataaaacagatactagagagaggtgtggataggggccctcggatgatgcagaacagtgggccttgactcgatatattagaataagatagacagagtaaactctgataaatcaaaatatctgaataatgactttgcacacttatggggagcccgttccacggtaccctttgactgttgtaaatgaagtagatctgttcattggccgtcgaaagcaacgtggacttgttaaacagctttgacaggataataagtgtggcccatacatagttcgttcgtcagcctgggtgtttcgcgattgttcatctaagtgcaaaaactgcaagacacaatgccctttagatgttaagctcgatggagaaatatattgcttcttaaagccgtatatgacgagtgtaggcacccacgagcggcaagaatggatagcttggttgatcgatcgacctcgagaaaacagattgaagtagaacgtcgctatagcctcattaaacaaagatgaaaggccctcaaatattgcagatctagacaatgctcactacagagtacaagggtcaaggcgacacctgaggtctataaaaaagtcgaggcaaccttggaaatggtcgggcatgacagaggtcagcgaataggaagtcgtgcctgcccgaggcctaccatggttatggaatatgtaccccaggatcaatggcaactatattttcacctacaacgacaccgatgaaagagaatgttgcgattctcatctattcacatgtaaattgaaggaacatcgaaggcaaaaggcgtgaaaatttttctcctcgccaagccaataagatacatatgcaagatgcgcttctgcctaacttcaatatgagctagaaaggtaaaacagcggagtaggtaatgtggacatggctctgatttttgcattatgagctagctacaaggaagtcatggctgattgagggcaaataaatccattaaagttttcatcagcacacaaaaagttgcaaacatgagatcgtcatacaaaggaaaattaaatcacacgagcaaaaggaaaaggaaacaaataactatcatcacaccatggacgagggacaagcgtatctagcccccctaggagaaacccagaaaaagaaaattacagacgggaaccgtggatgaccttgtagtcgacgacgagctcacgaccaccatcgttgatgacgagggcacggacggaaccacggccactagcaaaggcatcactgatgcgctggtagaggttgccctgggtgatcacactgataccctgcttgacatcaccgctctcggtcatggcgacgaggctgttatcatcacggaggtccaggatgcggtaggtcttgaagacggggccgagcatggtctggacaaccaccgaaggagaggggttggcgacaaagctagactcctcctgcaacttgcgggtgaagaggtcgacaccgaggtaacggtgctggccagtctggggggagaccgagatgcggatgacctggcaagggcggccctgaaggatcaggatgtccccgacacggatgaagtggcaagggatgggcacggtctcgccagaggagccgcggttgcggggctcgacgacgcggacgtttgcacggggggcagcgacctcgccgtgagactcctcatgctcagagtgggagaaggggtgcatgacacggtcggcagcgcgctcgacgccacggcggaaggagtggtactggccttcgtcgtcgtagtaacccattttgcgagtaggggcggtgtcacgggtagtggtagatgtagtggactggggagcgtttacttgggatgaggtggagtaacgagcacggggctgaacttcacgaaggtagacgtcgtctgccttgtaagagtcggtctggagttgggcggtccggtcgtacgaaacgtcgacggactgaggttggtaaccgtaggcggagtctacgggctgacgataacgacggtcgtaagagacgtcgaggtcgtaggagggggaggtacgttgacggtagtctctttcagtgaggtcgagttggttctcgacgactttatcgtagacttgagtgcggtcctcgtagtcaacagtgggttgttggtaactggggtagctgggaaaggttgtcagcccacatgcacgggtaccatatacatataaacaaaacaagcgagacaccgctaattgaagtggatcggggtttgtggacacgtaattttagtccccggcaaaattcgcaatcgctccatcccaagataggagatctcacaacaaatatcgatagttcagctgcagggccccccctccccaaannnnnnnnnnnnnnnnnnnnnnnnnnnnnnnnnnnnnnnnnnnnnnnnnnnnnnnnnnnnnnnnnnnnnnnnnnnnnnnnnnnnnnnnnnnnnnnnnnnnnnnnnnnnnnnnnnnnnnnnnnnnnnaaggggagacctggggctggagtaaaaaacacaaaaaaaacaataccaggaaaaacaattacataccgttcacgagtaagctcaacttcaggggcgtagttgtgctggtaggactgcgagtactgctgcgattgctgcttgtactgagggtgctcttcttgaatgcgcggacgctcttcttgaatgcggaactcgatgtcttcctttctgtgaacagaagcgggaaggggagcagaacctcgagtatcttcccgttcgacgcgcgaagtacgatcgaaattgacttctccctctactcgagtctgagtagtttcagagacagcgtcactccggtacgacgacgggaagacactgaaggggatggggacacgggcgtcaaagtccagattgacggacttctgagcgtcttttctcgaatgcctttcgaactgtcgttaaacaactcgaaagactaaacaagaaaagacttgaaagggaagtctttctcggggtggggaggaggaaaagagaagttcttttgatcctgcagagatagatagatgattggaatggaggggaagaaagataagattaagagccggggaatgttagattgtaggaatggaagaggaagaggaaatggaccagcacagtcggcgagcatcacgattatttatgccaggccatttgtttacgccgccttcccggtttgagttctcggctgatcaccgaggtactctcctccttactgtctctctacgctatctgaattgtcctattagaaccgcacgatatgtctgatggaagtcctccttctcgttctggtcaatcattcttaaaccccccaggaaggcatcttcattgatggatacccgagctgcaatcctccatacacatcgggccctttcgcatggggggctggccagcctgcgcgtaatatcacagcaccactactatatcgctatggcaacctccggggcgaatcggacatctggatcctctttgtgccgatcttataggctccatcacatcggcacacttgcattgggggttgcggagacaccttcagcgtgattattattattattattattcattccctcggctgaaaaaagcgtccgtttgttttgatcctgccacagggcgtttgccaggcagccattggcctatatctggcactattcacaacatgttccaggatacgagacactaatacgaataccaataccaataccaatgcacgtctccaccggcaaagtgattcatcgagatcattagaccacctttgggtcccagcccgcctcgccccagctactgcgaagcaccagccagccagtgcatgcagctcatggctagaccctcttaccgcccaagaagccgggaaatatgtttcaaatagcggtaattgcccgtactttggttttctcataatgagacatctgaagagggtggttaccagccgcgtgtttatgattccagtcatgtcgccactgctccaatggagtgattatcttgtttatgtatcccgttttccgaggtccacggaatacccggtactatggtaccaatccgtgctccgtaagtggatgtccattacggagtcccatactccgctccgcacagagaacggagtcatactgcagaagaatctcagcggagcacgcagtacaacataatatcgtctccatagtagagcctagcaatttcgtacatgtttctatttccacttgttccactcactactccactgttctttttcttctctcattggttctttcagatattttcgaagtataggatcagacccctttccggggtcaactcagctgtacatttacttacagagtggtattatattacggtcgcataatttctattgacagctagaagattatactatcgtaaaggtgcaaaaaaatctatgtaattagcgacatacgcccgtatttcttcatatagtagctatgtagcgggttcgaaaatgagcaagagccacaagtttggcgtttattgcgcccgataccatagacttatacgagacctttcctttatgtatttcggcgaatatcatgcgtggtgtaacgctcgaagtcttgatatgcgaaaggctggtgttaagtccctggcgatatagacgttggttatatataatttccgatacaagaatgccatgagaacatatttcttgtatccactactccatatacgacgtacatattgttgaataatcaagaaagcgataacaaagcgctcacgcaaccgaagttatgctctttgagaagttgcagctgggatagctctagaccatcgcgatgtttcccattcgtcacggaatgcctcgctctccgcattttgtgtcttgtatctccataggagtagacttggttggctaccagttcgccgattacagatgccgaaatcacataaattgatgcccaattccgagcccatggtgtaatatgcaaggcagcgaaaaggtaaccggctgcatgttgactctaaatatagtcggtggttcggtcttatgttcgatacagaatgcagcatatcaatgtattaaaaggctgtaaaaggctgtttggtacagcctatcaacaaggtcaagcaagatcccatccctggagtccttcttgataatacgttgattcttctgccattcagctatgaaccggtacgttatacatggacaaatcatctgtctataatatactccatacttgtggaaaaatatagctcgaatatcggtaatggacagaagagtagtgatactattcccactagaaaaagaaagaatttcttacaagacaaacagccatatatcggccctgacttttcccaaacaccaaaaatgaaacccaggcaccagaacggaagacacaagtggaagctagacaggaagaggacttcgtagaagaatgaccataccgaacagtaagacataagagtcatagcaaagcatggatcacaaatagatagatagaaaacaacatgggcaatgaaacctcgaaaccaagcgagatgactcgccactaggtacaaaccacccttgttttcaaagatgattcatgacgccggaccagtatggaatgacatggagaagagaacagagaagaggaaagaaaaaagcaactgagatgggttctagtatacatcgatggacggtaaaagcaaattaagatgggtatcgtgatgcgaagcagcggataagctcaaaagatgatagagcgagaagaagagggaaaccagctgtggtagtggcggagactaccgttctccaaacttgccgaactcctgttgccatttgagaagatggcgagtgagcacgtccatcatctccacgctgctgagctccttgaaatccctttcatggttcgtcgactcgccatagccgccgtctgtggttgcggggccggactcgcctccgtcactgcgcgcggatggcatatcgttctcaatctgattgaccatgctcttcaagagtaggccctgggcccggtcaccgttgccagtaggtgtggaggagttctcgctggaaacggccatctccacttgcatgcgtgagatgaactctaggatggctgctactcggcgcttcatttcgttcatcgttgttcgatgtggatgcatgtgacgcggcctgcttggccgtcctgactccccaccattcacgtgtgcgccattaacaccgctgtagccaagtcgaggggagtctccgccgacttcgtgggactggccgcggcgcggcgagttcgccatataaccgacatctccattcccattggtgtcccggtcttttgtatattggtttcgaccaacacggccgcgacgagcgggaggtcgaccggacttgcgagttgatggacgaacaggagcgggctcttgcggggtaggggtgttagggcttgcttgagacggttcaggctctggcggcgctgtcttggttggggaaccggtttcgtgctcggattctgttgtagctgtgttagaaagtgaaaaatcgtccactagagctgtgtcacttaccatctcctttgcgccggtttgatcgttctttccgacgtttcgccgcttcaggagcctctgtctcgccctcgtcggggtcatttttaggttctttctccacctgacctcgagacgtggctctctgtctgcgacttccgttgactgcaggctttggtttcgcctcatcaccagaaggcgggtgagatgctatattgctatgcctcgagacggcgctaggtgagggtgaagtagttcgcggacgtttcgctcgttctctattcctgggtaactagtcagccatattatcctagccaatgccatgcagcttgagaatacgcacgtcacactgtcacttcgacttcgcttgcccagatgtgtgtctgtctcatccgcattacttttagtctcagccttgctctcctcaattgcgcgtcgtatcaattcttcttcatcgtaagcagcatcccggctattcattgttgatcgtcgcttggcgtgcgcagcggcactctcgctggtccgggacttgggatccctggaacgccgcgatatatctctcgaggaggcacgagaggacgggccgggggacgggggaaccgccgggacaaccggggcgactggcacgtcaggtacctcaggcaccgccggggttggggtcggggtcggtgtcggggctggcgctgacgctggcgttggtgtttgtgatggcgctggaggaggagggggtggtggcggcggcggcggaactggttctggtgcaacaggaaggtaggttgaggatcgttgtctgcaggattgtcagtatgcttcttgaaaacggtatagatggtaacatagagtagtcatttgtatctcataactgctcgggggagtgatcgtgcccgaggctgggtcaaaaaaaaaaagcccctccaagcagcaagaacaaagcacatccacggagatatagattgacgacaaatgcaggaataatacgtagggccgagtaaatgcaaagaatagcattgtttcacttacccatgaggttcatctttgatcttgtgcaaatccttccgacactcctcacaaaaatattcgtcaggactcgttgcctcgtccatgattccaacacaaccaccatgttgccaaactttacacaagtcacactggataaacatgctcccaatatcatctgatagaggatcagatagatcagtggggacttgtcccgactccagcttgatggtgccgcgaccgagggcctcgcgacgagaagaaggcaagcccggatattcttgctgaccacagagacatcgagttacttcctcctcgtcatcatctaggtcatcctcgtcttcttcacggggtggatcatcgtcgtcgtcgtgagcgcgttggcgctgccgcgtatgtggagggtcttttgagccaccctcagcatcatcgatggactgagagcggtgactggtcgattcgtgaggagagggattcttatgattcgatcgagtgcttctctcacgagtaagagaatttgaggagctggaggaagagttggtttgttgtaggagggcaggagagggctgggaggtgcgagcccgagaggaacgacgaggagacatggtgggggaggtttgagtatttgaaggaagtataaaagagagcactgaaagccagattaaggagaatcaacagatttccgagacgttggctggtgtggttctaggtaactcgagaaaacccgtttgcgagggagctctcgcgcgcgattgagagctcttggggagggtgcagagtcaagtaaaaagaagcaggacaattggaaacaacagatatgtataaaggcgtcgcaaggctcgatgaagagcccgatgactacatagtccgagaaatgattccttataatggcggggaggagaaagagaaggaggaaaagcaccggaacgggactccaaaagatccaatcgccggtttccccgctctcgacgcctctcgacgcgcgaatctttcaccactcatgctgttcgtgtttcatttcctttttgccctacatatggtggaattgattgctggttcctatatacctttgacattattttggctatatatgttaatgcacaatggttttgtggccgactaattggggttgtatcttccactagcacaacacgatggagcaatgagagagcttgcaagcgaaagagagttgattgataagaggacaagacacaacatacaatactgtatagggctgccgatattctcccggtgtgatatatcccagtggaaaaaacagagaacagagagagggtaagaaaggtctaacatggattgacggcccttgaaccgcaaaactcgaccttgaatcctcctatgctgtgagaacaataagatcatcaagaattaatgttcttatgatccacatcgtctcaaattctgtatgtcccatccttcgtaccgagtgtgcctctcatttcgggccgaacccgttttcagcgtcggcaagacaactttggtctagttgcgcaatgcaactcgtagcatccattcttcccaacatatagatgatgtagttattcctccgaatatgctctgggtgcattggtggttggaaaggcgaaatgaggctttgagcaaagccctccggaggggttcaatcacacgcgatcgaggttcgttgcactagttggctaggtatgggttgtactgcgatcagcaaatccatagccaacattgaatcaatccctcacaccagctctgagatgctggattccctgtggatgcggatatcgggagtacctatctgggagatgatcggagggcgggctttttttgtctcccattagaggtttttgtatagactgatgaccaatgaccaaaggtatagtgcatggtagcacctagaagatcagatcgaacatgtgctctataggtgcctagtctgcaaagtagttcttcagaggcgtgtacgtgtaatgccacttctctccgaagtcattgggtagagggattgccgaaagtagattagcctgatttctaaattcccgtgacttgtctctttctcttcgtatccctcaacccctcctagtagttattcaagttattcatttgtcttgtctctaacactgaatctggaatcgagttcactcgattcccaattttggatcctcgtcccatcgattttggatatcgaaggtgctgagtaatagcaccattttgtgggtaggttgatattcgtgtctccgggattgtggacagcagaggaacgccaggattggattgaatcccagttgcatgttgatctcactgcctgtacgcttctcgtgagcttatttttaaaaggacaaaagcttatgactgcggatcacagacattgaagacattacttgccaattcgacattcaacactgtccccgacttttggattattggccccttgacaagaaaatacggtggcgggggataaaaggacagagcgaaagggctggaatatcatcctcttagcatcgtcggcggttgatggcgagcgtggatatcttgcatgatgacagctacattgagtatgtctcagggacatttggtccggatgatcggggattccccaattcaggaaaacgatcaactagtggactgaatactgacgatgccatgtagacggggtgttcaattcgtcccccgatacaccctctgccatttaccctgatcgtttgatccgtcctctacctagacggaccctccgttcacgcctctcctccgatgctgccgacacactattctatcctcctacgccgccggcgtctcaaatattctatggtgtctctgcggattctgaagaggcggtgaatgaatccaaagtatatgtgcagcagacagtggatactgaattgtcaccggaggttgagaatcatgaatttgagacgccagtagagttggaaagcggtgatgaaagcggtccgatggttgttcgaaggagtggtgttatccggagatcgtcactatcacctcccgtgtctggcaatccacatagcttcccccacgacacaccgcagacaaaatcttcaaccggggacggctacgacgcgtttgagaatacgaataacaagaaaaagagaaagatacctacccccgggaacttgggagggcaccattctgccttgtctccggagttcgccaatatgggcttgacaaactcaacccccgtacgggcccctactccaactgatgccactggcacatattatgggagtggaaaccccgcgtctcctttaggaaatgggatatctggttcaggaagaggtcggttgggacgtcctactgttcgtagcagcagcagaaacccgttatcgcccaatgcccagcatggatggttgaatgcccggacgcccagtcggcgagacgggttgatgccatcccctggcccttctggtatgcaattttccattttcccattgcattatttgctctaacttctgtaccaggtgaatcttctgaccagggaatcatctctaccgcgatcgccaatgccgcaacgctctcttccccacctcgaggtcctggcaacgtcagccttttggaaaaagagaaagaaaataccactccgacgaagacacaattcacgttcacttgtgaatctgactcctctaagggcatggcgatgcagcgaaattattcaatcccttatcgatcccccacttcaccactcggtccggcaagtcaaaaacagaggggcatctccacacaagggacacagactagctccatgaaccaccaggccccacccgcgcaagcacccgctcaaagtggggagccgacccccgtgggccccaagaaaaaacgatccccaagcagcacatacgcattgtctgcacgtcaacgcaagatccagcaacaatacacgaacttccaccatccccctagtctcgaggatatctggatttgtgaattctgtgaatatgaaagcatctttgggcatccgcccgaagccttaatcagacagtatgagatgaaagaccgcaaagagcgcaagcgactggcggagaagaagcggcttttggagaaggccaagatgaagggtcgcaagaccaagaaggcgacgaagaacgcatcgaagaatggctcacagcagcaggcatacgaccgcgcttcggctgacaactcctccggcggtggatcaggtcttcccgatgatgaataccaaggacatgagtatgatgatgatgaaaatttgccgatcccaccttctgcccctgcgtcccccaccgacctcaagcctccactaccgcccactggaaattatccaaagatagcggcgtctgttccaggcatcaagggtactgcgaattctggagcaagtcgaccggcctagtcgtccttctgcgtctcattggtgttcttttgcatttcatcagtccatcattgcatttggtttttattttcgggttgacaggttgacagggtgtatggggtattttttggaggggtgttctcgggttgttgcatggaaggaaatcgcctctcagcatgttggtttggcgagcaactcatcggacaaagtcccttgttggagtctggttcctggttatctttgtacttgtaatgtccatgatgtgtatgttctgaatcaaatgtgaaatgatccaatgtccagtctcgtagcatacattcttttcttagatcatctgtttaacttcatttgtatataccgaaaatagagaggactttttgattggatctcgagccaccacacttgaaactatcccaacctcaagttggcgcgcgcgaactgcaaccccactagataccaggtttcggacccctgcaataccccagcttgctagctttgtgttagtttttgattccaggggtgttcggtgttctattttgatccatgcgtttcatcttcttgttcccgagtgattgtctttggatgaaaggcgaggatggacagtggggaagctctagaaccgcgcgctcgaaggagatgcgtttcatccggggccgcagatgccagaaaatagcagaaaatagcaacattgcgctttgttgccttcaagttctgacgaatatgccccggggactgagaatagggctaatctataaagaacagccccgggccattgatgagagtcttccattctattttcatgcatctttctttcattcattctcttctatttctattatacctcttgaatacgacgggccactttctctttgtcccaatatctagtcatacaatctcgacaatagcttcattcctcttatttggcatctggtctgccgaatcttggaatactcctctcattatctcattcgacttcatactccttcttctcgatataatatctgcgctgtgcgccatatcctaagcacttactattgctttcattcgcaccttccaatcaacaaccacctaccacatcaccataccaaatccaaagatgtctttcctagccgtcccactcctcaagctcggcatatcccaagccaagaaacacaaagccaagaaagacctccaaaaacaacaaaacgcctacccaacctacgaacccgagcaacacccaatgagcggctacccagccggcgccacgccggggacaaccctccacttctctccaccacaagagaaaagcaaaagcgccaaactagccttcatattcttttcaacgttgcgcttcctacaattcgtcttcggcctcaccgtcattggcctgtacggcaaagacgtgcatcacgaccactccgaggaagacacctggcacgcgaaatgggtgtacgcgctcatcacggccttcctcgccaccgtaactgcagccatccacctcgtcatgccgttcgtcatgcgcaaagctaagcgcggcgtcggggctggctccggttccacgatgctgctgctgccgcagtttgtgtgggaatttgtggtttccgtgctgtggttagcactctttggcatctttgggaagatgtatattggtgttcatcctgtcgtctcgaagactgatgctgcgacttcagcgcttggtgatgcgtcgaagataaatcggatgcgccatgcggtttgggttgatattattaacttggcgttctgggttatgactacttcgtgggttctgctgcgctggttgaagagtcgcaggtcagctggtgcgcttgatgctgagaagggtgagcaaatttaggtagttgagggtgtgaatgctcactttgatagtgggcttgatgggtgagatctgttatgggcagatgccttgatggcatcggatggaaagggagtttgaatagcatttgcattcgtttgtttcttttgtatctgacatttggactcgggagtcatggtgttcagtgcttttggctcttttcgtggatggcgttctctcaatacatacaaaacattaacgttctttttgagatacaccccgatgacttcaatttcaatgtagtctcatctagagattaattcctttccgtcatttacttgaaaaatactgagagctacatcagtagcttcctgctttcttatagaaaatcaaccgcttctctttttttctctcttagctcctgagccttacatcaatatcgatgcttttgattcgctcttcctgcctcgtagccttgtaagaagtccgtgtcctaccatgagcctgctgggtaggttcacttggctgtacagcccactgctgtccccgttctcaagggagcttcgttgctgtcatctgggataaagagaatgaagttgtgatctctcactactgagagatgaaccttgacctagaggctcacaatttctttaggtaaggctcaggttactacggaatacgaggtgaaattcggttagactccaatacaagaaacattcatatgcgacttatttatttctgtagattcgctggctaaagcctatcaaataggccaaatctggtatcccattcaacagatatccgcccagtctccctcaatatccccaggaacgtcaaactgcggtccaccaggcaatttgacggggttcttcaccactttgaacaatggcttcaccttgctgacctcctcagggctcagcatcgggcggcggagagtggaagcgcgcgggaaaggaataggagatgttgctgctgcttctctaatagcctcctcagcgacggggtcatcgacaaagtcgtcgtcatcgaatggtgaaaaggatgggatggcgggctttggcgcgggggcaatctcatatcccaggttgcgcgtgatctcgtcgtcctcgtcgcggaagctgaggtgctgcaagagaccgagctcgacatagctgtcttcgtagtcatcggccttggtagtgggctcagagcggcgacgggttggaattgctgttcttgggatagacacctgcgaggacttgcggtggttgaagactgggcggcggcgtgggcctcgtccgtggcgtgtcgcagtaaggtaggtcttcttgggaccatgctggctcaagctctccagggcagtggtcgactcagaagtcatggatgtcttcttggagtcctggtcgccgactttcttcggagcagtcaggaatgtcttcttggaacctcggtcgccaatgtcaattggagcagtggcagactcagaagctatagatgtcttcttggaatcctggccgccaaccttctcgggagtgagggtagacttggcatccgtcaaggtcttctggcgacgctgacggcccgtgttaccgggagtagaagtggaagtgtgatcaccagccatgcttgtggtgggtgaattagaagggttgagtgttatctttgtgccgatgggagtgtcaaggagcaatcgagttgctttatatgtttcaacctgtgaaggctgcgactttctcacgattgagagaggaggagaagaggctccgacagcgcagcctggctgattcttattgatgcgagcacatgagtcactaatacgcggttcatatggtgcgatgtagaacgcatttatgtttacgttttctcctttgtcgccagtcacaggcaacggtgggacagtcaccctttgtccgactaatattgccggcgccttaatgcgtagtataagacgatttagggtacgggtattaacgcggctcgagagtcgttttgcaccccatattctccagaagagatgttcgaggcgacgctcggtctcatctttgctggccaggtgcgatgtcgagtaggctgtttgttgtcagccagcccgtttataacgagaccaggagtagggagtgttatgttaccttgccaaaggttcttgtataagccattacttaatgtaccctgctgcaagatctcgctagcagacacacttgacatagccacaagaccttgggggagctttggctccatcttagatgttcgttttggtagtcgagcttgagatgacgagataattttgtacggagaagtataagatgagtggcagagaatttgcaagttgacgaggggtcaaatgatgttgaatggcgtggatcagtcgtactgatgtaaagtcaaggcttggtagcatcctttgtattcagcacaaacagaatgctgacaagaaaagaaaaaagagaatagaagagcttgaccggcaagtttcgaaaacaaaagtttcttgcgttattcctgtgtcgcactactttccagtggcgagatgagactttgaagctgcaagatattcaaggttgaacttgaagccgaggtaacacatcagttagagccttcgaacatgctccattggggtttaggtgcgcaagtcatgactttaaaagctgcactccacaaaaaaacagaaaaaggaaaagtcgagaagtccagagacaaaaaatttgaggaatgtagtaccccagggttcgcccttgcctgtagggtggggggaaaccccttagattcagaaccggactgaatagatcttcgttaaatctccaattgtagatctccctagatctccctagatctttccgaagccttggaaagactaaattcttcaagtatgttgtatgtatgtgcctcgcctggatcaccgggatgagccaggattggacttcaccattctatattatataaaaaccatgaaaccacttactaactactcactaaaaaaagactaaaacataaaaaataaaaaagcgtcatcgttacattccaattgcgcgtcctttcgcaagcagggatgtacagccctattgacggccaacttcctaaatatgacacagaacaccccaaatacgacctggagaaaataatcagagcaaatcaaggagctttgccgaggtgacattcacacccacatgccccttcattcggtacatccaatagggaacatctttcaactatgcgggggaggctgtaattgggtttgtattttctccgggtttctgcaaacgatctagaagatctaatcaaaaaattatgctcgaatatcttcaatttatcatacattataaggtggtcataatctatattttcatagagatttactatgcgatgaacatgccactaagttgacacgtcctaatcatcgtccgtctacgtttacttttagtcttaacatctcactcaatagataaatataaccttcgaagcgtctcagatctggcaggggtattataaatggattaaatagcataatccggagcgtctagatacaaatgcatacacatctcggtccctgcactatctactcgcgaagccgaagcgcaacaacctgcccaccataagagacacccccctggtcacctccacgagtagtaacataagccaatttcccacccggcacgatctgcacagaagtagggccaataaaagccaagctatcacccccaccagcaacgacactctgcgttccatccggcgtgatcttagcaatggcattagacggctgcgccacataagcattaccactagcatcaatcgcaaaatcatcccaatccgaatccgtatcgccggcctcgcgcaccaactgcgcaatgacctgaatacgaccgaaagtccccccgtcttcgctgacagccacccgggcgaatatattaagcgcactattggtgaagtacacattacctccgacaacctgcagaccattgatgccgatgggcatggacgagttcgcaggcgcggccagggcgtcgttcttcaacacaaccttcgagacaccggtagtgatgtcgacgcggaatatggatcccaaccgcgcgtccgcgatcaggagaatatgcggctgcgacggcattgaggccatgccgtttagcatatcggcgtccgggatgtgcgcgacggtctggatggtggggtttgtggcattcttgctaaagtcgacagtgtagatggtttcgttgtcgtagtggtatgagccccggactccgcctacgacggcatacttgtcgtggccgacggctgcaatgccggttagagctgtggcgccggggagcgcggcgactagctcggcttggggattgcgggcgagcgggttgattgtgtagagatgggcttcgtagaatgttgtgaggaggagatggccgttgggccggagctggctgttttcgatgttgattgagctggtgaagttgaatagttgggttgtcaattgggcggctgtggcgctggccaccatggccaggctcaatgtaggattgaaacgcatggtacagaataatttagagaaattataggaatgggatttcaactaacaaagaggggtttttatctacattgttgtggaaggactttagctctgagggatcaagtgggttcggcacggagcgcagaagtggtacgagtcggagatgacaagagatcgacgaagtagccaagacgggaaattgtccatttgaggctttaacaggaaatcagcaccgagctatggaaaaattatgttttggattaatgaggtgataatgggtgtggataatgacgctgtgtcttttctaacattcactactatgcaatgtcctagttctagagaccattgttttcgttcgactatgttcgagtatgtttttagctgccctacagaccactgaatatagcgcattgaggggagaataactagctacctgttgtggaactacggagctacggagttgaccttcaacattttgaaaagtataagaacaagccacacttctgttgaatttcccgctcaatgcggagtagacaaatacaacactgtaatccacacgatagactaaccaaactgacttgtagtccgttaaatgtcatcttatgtactccgtgctccggcacttgtactaactcgggcgagcatccgattctcggccgatctagtcccagataataaatatgaagtctcgtgtgaaacttcataatctggtaaatcaggactagaaatatcatcaacccattgccttatgcataatcgggttggcgccggcactacccagtggagaacctgtatgggaggcatcaaggtcattgttggcaatgctttccacctctgcatccgactcgtcggtgtcgtcgcatcctgctatctaagagtccttatatataggctcagaggatggttttccttcatgatttgctaacaaccatcgaaaaatctctaacgaggcttcacgtaatgtatcctgcgttaaagaaggaggagtatttaactgagaaaagctggagttcatcggtgacacgttagactgatctgggtatggaatggtgggattatgaagccgaaaccctctcaagataggccagagtgtgcctcgagtatttcttatgtttttatgtccgtaaagcacagttcttctcctttgtttgccctatcgggggccagggcgaaaatgagagactattgtagtgcagcccatcatcctccgtgacaggaagacataagagtctccagacattggctcttttgattgcatattccctaaactcgtcacaagcaaaatatggacctgatcctgcaaagtccataaaattctgtgcggaggatgtccacggaaacccactcggatctagaggaggcgttccacttttagcaaggtaaataacctttggaacaagtccactcagtgcagctcctactcaaagagcagaaaggctcggacggcgtattccgcacatcaaagtgatcaattcaactagggacctggtgcctctgctagttccgatctcgttggcaattcttccacaaccggatgcagccaagaactaacaaggttgcagggaaccccaggctcccaaaatgatccggaaagacttgacatcacgacgctagggttgcagcttagggccatataataggcaagatcatcaccaagggcaatatattcgttccccaatgccttatccgaaatgaattctaccctgccaagtacaatggttggagatggcaactcaatcctgcgtttgtaatgttgattcgtcggaaatgtcaacgctgctgcaaaagcgccaaaaaattgatctccaagaccatgcagtaggcaaaactcagacagggccatcaaggcctctccagaggaaagtggaaaacaatcggcgaattctggcgcagaagtccctatgccttgccatagaatttcgaatagttcatcctcgcctaagtcaatagaccaaggtgccaggtagacattatcgtttcttttggtcaagaccgctttccatccatgcttgggggcttgtatagccatccaccatcgagcaacgttgctttcggcttccccgatgtgaacttcaattggtggtgcacgctttacctcgtctctatccaccccatcgaccgcgcgagggtttgccgttgagctagtgtaaacaagctcggctccatcgtgcttttgaagttccaacaaacgggcggaaagaatataggaccaagcaagtgtgaggatacaatatagtttgaagaatatggcttagaagttcgccagtgatggaaggtgtctccggaaactgacaggtgattggctgaagctgctcgttgtttgagggcattgcgtagaggaggtacgtgagaattcgcaatattcggaatggtaaggctaaaggtaatgtacatgagttaacgaaatgttcgcaagaaatatgtcttcggatgttgtttaagtgatattgttctccttatcccttgcttggcagcatgcgtactatggtaaccggtttgacacagtattattttcaatttcaatttaacaaaattatgtttttggtcttcaacaaccaaaaagagtgtagtcaaatcaaaatactaaacatgatgagaagagaagagagaggagttgccctggtgcccggccatgcgtgaccaagcaagaacaaacaaagcaaacaataatacgctaattttattccacagctaattgcctatttaggcagggggtgtctcagatttcctttttcggtaggactcaggggtctagaccagcgtgttcaagctctttttgtggggagctatgtaatgtgataggctcccccacaaaagttcaatagactcttagaaaagagtatcccgcaaaacacaacatacgtgaccaaattatcccgcaactcatgccgtaaaatatgaccggtctatatcggattcatatccgtgtcaaataaaagctagcatcatgtaagagatttaatagtgcgcagataacatgctcaggttacggtatagcctccgtcaacgcggagatccgccccagtgacgtacttggaggcatcgctgagcaggaaggtcacagcacccatcaggtcctccggtgtacccatcttgccggcaggaatgagggagatccactggtcgcgaagcttggggttctcctcgaggatcttgcgagttctgaatgacgaagaaagacatcagcaacaatttcttccggaggtctgctcaaatgtatctcgtcgtccatgtaagagttactcacagagcagtgagcatatagccagggctaatgcagttaacacggatattatgactggcccactccacacctagcgaagcagcaaggtggcgtacagcagccttcgcggcgttgtacggagcctggggctggggaacattaacgatagcgccggacatggagccgatcatgacgatgctcccgggcgccttccgctccatcaggtgcttagcaacattaatggcgaaaaggtatgtgccgtcgacattgacaccccacagcttctgcatacggtcgaaggggtagttgatggcctcgaagttctcggtgaagccggccgacgtgaccaggttatcgatcttgctgtgcttggccaggacttcggccatcgcattgctcacagagtcggggttagcgacgtcggcataatgggcggtgaccttgggcatactgtttggaattagccactgcggcgagctggaatggtatgataataaactgactcttccacaccgggattctccttgtggaactgctcgatcaatgaggcaactgcggcctcggcttcgtcctctggggtatgtgttaggataagtcgcttgttccggttatctgtagtggtcgtaggaacttactattaagatcaatgatggccaaatccgagccggaagcaacgaggccttggcccatgactagacccaagccacgagcaccaccagtcaccacgctgactttcttctcaagtgagaactgggccaaagtacgcttgaaatgcatgccaccgcgtccctgagccacgggctgagtgggcatctcgttgtcgggagggtattcgatttgtacgctttcatcagtgcgagcaaatctgccctccttatcactagcagcaccctcgggagccttatttgtagcagagaggatggggtcttttgcagggtcatcgctcttcttctttcccagtgaggcggtgtatgagagaggacgtgtgaggcccatcgctggacgggcggctgctaatacaggacgggcggccttgatggcatcgcgtgcgactgccggcttgaacattttgaaggttatagctccaatgcacaatagagctgtagaggtatacggttgggggggacgcgacgtataatgtacgggagaataatgttggggaggaaaaacggtctagacatccaggggaaggtggacgtatcaaacaaagcaggtcatcaggtcatcaggtcatcggacctcatttgcattttatttttctcagagcccaagggctaagaattgagacacttgcggtgaaaaaaagccaaaggatatcggagggctattgactgcctattttagtctcaagctttgttttatttgtttatttactccaattgtagctctaaagaatatagaaagctagatgggagactatgatgtcaccaatttagtacttttgtttactattattattcaagtactacgtatgctctctaatgttattctcattcaaatcccttagaacttgatcataacgatggaagagctacacggacttttgcctatttgctaaaaccagtcagtttcgtttcggccgcattttaccgcacgccaatgaagtgcttggatgcagctttcggattatcatctgatatacgtagggtgcagctttttctctcactatcctccgagcctaaaatgttgttttcgattctctgtaattgtaaggcgaaatcgaaattgatagtgtgaactccatatttgtgttaattttgggaggtatccccatgctgaaacttgtacctctataacaaaagtctcgctctattcggattcggcgaattccaccagcggtgttccgcttttgcattgatcctgcaaggcacatgttggtcagctgttctcgagtcacatttctctgggggttttggagttcaagggggtgaattaaaaacgctaaacatattcaaacgaaacaaaaaagatgtcatgggggtccaggaaagtccaggaaagtctggtcaggggaaaggcgcatgacttactcctcttttgtgcacgacccgtgcaatggttccccgttggggactgcgaatcaccgtctccatcttcatgctctcgatgacaaccaacggctggtctttctccaccacatctcccgcctgcacctccacccgcagcactttacacggcatcggggccaggacgctgtttgtcacatccttcagtcccaatgccttctccatccacttagcccggggcaccgtgagtcggtactgagtcccacgctggaatgcgataatagtatcctcgtctcgaattactgttgtatctaaccgggtgtgcgggaaaaacgacgtgacaatgtgcgacgctggatccatgtggctcaccacctgctcgaaaactcgtccgccaacctccacgttgaatgtgtcatctgctgtctgctgtactcgcacactgaacgtggagccgtcggtagaccctgggccgccggtctcggtaaatgacaactgtcgctcttggtaactaggagtgaacccgaccgttgagcctgcaacccctgctgaggatcgtgcccctgacgtggcgtcgcgatgtagacatgccaatgcgacttgcgccagcacttcctcctcggtggtctttgggggaaagagctcgtcacggtgcttctcaatgtagccggtctcgacctcaccagcgatgaaatccgggctcttgcagatggcttttaggaactctatgttggtcacgggtcccgcgatctcatattcttccaaagcagcagctagcttgcggagagcctcctcacgggtttcaccgcgcacgataagcttggagatcatgggatcatagtgggccgagacatcgtctccttccacaaatcctgcgtcaatgcggatgtccttcgaagtagccggcgttcgcacatggagtaaacgccccgagtcagggataaatccctgttctgggttttcggcgtagattcgggcctcgatgccatggccactcttggcgatacgctcttccacttcttcttgcgtaaggggcagcttggctccttcagccaccagaatctgccagtggacaagatcctctccagtgaccatttcagtcacgggatgctcaacctggagacgggtgttcatttccataaaatagaaatcccccgagtcattatcaaaaatgaactccactgtaccggcaccttcgtagccgacagcctctgcagctgaccgtgcctttgcccagaggtcctttctagttgcatcagggagatgaggcgccggagattcctctagaaccttctggtgcctccgttgaatactgcaatctcgctctcctagtgcaacggagttaccatgcttgtcggcaaatacctgtacttcaatgtgccgcggtgtggtgatatacttctccaccagcacattatcatctccaaacgagctcatggcctctgacttagccgactcaagctgagcttgaaacaccgctttggaactggcgatacgcatgccctttccaccacctcctttgacggctttgatgagcactggatacgtgatcttgtccgcctgctcctcgagaaacgcagggtcttgattttggccatgatagcctgggacgcatggtacaccagcagctgtcataatctctttggaacgactggtaggacacgcctggtaagcatagtgaatattcaaataatgcaatgagcgtacctcttatcacccatatcctcaatggccttatacggtgggccgatgaagaccaacccggcctcggtacatttttgcgcaaatgcagagttctcactcaactgcataacaagctcaagttagtattccatctagaatgtaaatatgcacagccgacttacaaagccatagccagggtggatcgcttgacacccttctctctttgcaatctcaataattctatcaccatcgaggtacgccgaaaccgagcccaaattaaaggcgaagggggagctcaaggcatgttgtgatcggctgtccgggtcggtgtagagtgttgttacgcggatcccacgttccgcggcagtgcgtccaactcgtctagcatatcgaagttagcaccagaaattgcacatgattcagtgcccaacatacaaggcaatttctcctcgattggctataagaattgaatctaacgatttgattgtatttggtgtgttagtggtcgatgatacagctcgcgatgttccgcgagtcgcggtcggggttaagcggggaacaatgcggagaagggatgagagggtcatgacgatgggagaacagccttttcagctgtaataaggccttttcagagcgtaattcaaatcacaatgtaagcataatcaaggtgctttgaagggacaaagtagagaatgggaaaatgtcaaggatttggagaagctcctgttgagccgatgcaaagcgagattgcggggaaagccgagggtataacataatcagccgtattgggagatgcatggatggtcacgaggcctcgtgggtcttccacccagtactagtactagtagatatctgaaaaggtccttcatagctgatcgagtgaataaaaaacaccgtagctgctcatcaagtgaagaaagagtgatactaccatattgttgactaccccatggggaaactggggattccggggtggatcacgtgagactcatatacccgctgggtattggaaaatacccctccgtaccttctcccagttctcctcattactcccggcttcaacattacgcttcacccttgtcaaatggttcctccgaacagtgattttatcttatggtttagtggacttcctatctcggctcccgtggtgccaactaacaagttccacgcttcaaattatctatcgagccaaatctcccaaacttggtaaagtgaaaatatgactgcgataagccttccgattacatatcgggagatacaaccttaaaaccttggaataacggcggcaaatctatctcttatcctataagggtatggaataaagcaagcccacgaggcgaccttgattgccagctcataccttgtaatcatggtgatatgtcccggacagaccttcccagataggaatggtgcctgttaactacatataggtatgttgtgcgaatacgatgatgcgtttccctcccttctgtttatcctatgttattcagggaccgctggggaacccagacagtcgaatcacggtcgctttacaggataaggtcaaaattatataacatctgttaagcttgtattcatgctgtcaggtatatagtaattatattaactttgcgccactgcgaaggcctaacctagagcttattgatgcaatgtagcaatatacatcagtatcagccaaaatgatgagataaaattgcggcagttcgaagaaaaagaactaccactacagaatagtgggtttcagctgtattttgctaagcgtcgtggcttaaaagattttgctgactcctctccctcgatcttgggcttcaaactcagccccgccatcctttaaccacatcgcatctcccctgcagattgtttgcttgcaaaacatcattttcgggaaagcccagtatccactggatcataaatcttcaaaaatggaagacccagaccggaaaatgggtaaaagtacaaagatgaccaacaaactggcggcgaagctagcgaaatggagaaagaaggagaaacccgatagaacacgtggaggtgcccttgtcgtctctccgaccgcagagtcaaacacgtccgagccttctatggtaaactatgtacagccttcagatggccttactggaaatcccgacaagctctccaaacctgctttggtgacttccaataccatgccggtctcaagtcttttcgagcccctctcgctggaaacgaccgacgtgcagcccgaaaatttcatacccggtccatcatcttctcctacgaccgaagacacctgggcccgggcatataaactcttgcaggctcgagagcccgagttggtaaaagattatcagactcatttgagcctagcgcaacccgagaactcagagcacataaatctctcaaatccacactcagttgagcgggtgataaagcagctgctggaagttcgggaccagaagcagtggcgagtctcactagtgggaaaggaggtgaagatacgagagcaagccgaaaaactagttaagtttctcctctgggccgaaccagccgtgaagaaagccgttagcacccagccatatgcagcattggcgtgggctggcgtttcgctgctcttacctgtaagccaagcaatcctcctattatctagccaaggctgacccagacagcttctcacaagcagtaccactagcaatcttgcgatgcttgaaggcttcgattccattgatcatgttcagatctactgggatatctgcgagaagacatacttgcagtccaaggatggggaagagtatcaagctctcatccaaccccttgctaaggtctactcttttatactcgaataccaagcacgtgctatctgtcatttctcaaaagctcaagtctctcgcgcatgggagaacatgacgggtgaaagcaattggggaaaaataagattaacaatcgaacaattgagcgataactgtaggagctatgtctcccccctcaaacttggggaggttcgccgtcatcgagatcgtcaattactggagattaaagagtctcgggttattcttgatggcattttggatgtcctaaaagcggacacgagtcggaaccagaagaattataaagaccagaacgagcgagggtttcttcaagcacttgcgtccgactacgaggatggcaagaattataacccactgagaatcccagggacatgcgattggttcttacagggtgacgtacttcgaaactggcgggataacgaccgctccagtcttctgtggatttccgctgggcctggctgtggaaagtcggtgttgtcacgggctctcattgacgagaatcggctttctacgaatatttcgacatctactgtctgctatttctttttcaaagatggggatgagcgccgcgtgtcagccactgatgctttgtgcgcattgcttcaccaacttttcacccacgattcgacgggcacactgatccaaaatgcaatgcccagccacaaaaatcacggcccaaatctagtacagaacttctctgagctgtggcgtctgttcatccaatgcgtcagctcgccagaggttggagagatagtttgtgtccttgatgccctggatgaatgcaatgatcatagcagtcggcaattgatccgcaaactaagggagctttactccgagccccaagtttcatctttaacctcgaaactgaagtttctgatcactggtcgcccttatgatcacctggaggcatcgttccaagatttccctgatacaacaacttgtgtgcgcttggacggagatgaaaagaccgccgaaatcagcaacgatatagatctggtcatcgatgctagactacaaaacctcgcccaaaacctcctagagagcgaccgtcaaatgatttcagatcaactcaagagcatggagaatcgtacttacctctggctacatctcactttcgatattattgagcatagccggagtgagtatggtcgactgtccgatatgaaagaactattctctgggctgccttctaaggtctcagaagcgtatgagaagattctggatcggagcggggaaaagctccagacagaaaatctccttcaaattgtcttagctgcatcacgacctctatcacttgacgaagccaacatagccttaacgatggctttgagaaagggcacttttagttcttacgacgatctccagaaagattcttggccgagagataacttcaaaggcgttgtggaaaatctttgcggtctcttcatcaatgtgtacgattctaagttgttttttatccatcagacagccagagattttctcatcaaccctcctcggagtggaaagtggaaggggcggctgagtatgcaacattcacacgcgaacatggcgctgttgtgtctatcattcttgtcgtttctagatgggcaatcatcagtggagcaaatcgaggcaaagtttccgttggcgcggtactcggcccagcattggatggatcatgcacggcctgcggagacagagaacgaagtccagaaaagcgtcatggagtttttccttcaagaaaatcaagcttggggtgagctctttgagtcgatttattaccggcggtcatatggacgaccccacatcctggcaactccactatactacgcatcgtccttcggtctccaacaaacagcacaactcctattggctaaaggcgcggatgtcaacgcgcagattgacaattatggaagtgcactccaggcggcttctgatagaggttacatagagattgtggagctactgttagcccatggcgcggaaatcaacgcacagggtggcatttacggaaatgcactcgaggcggcttcctctggcggccataaagagatcatggggctactattagccaatggcgcgggggtcaatacgcagggctcttatggaagcgcactccaggcggcttccgttagtggtcatacagagattgcggagctgctattagccaatggtgcggagaccaatacgcagggcggcttttatgggagcgtactccaggcggcttccgttaatggtcatacagagattgcggagctgctattagccaatggtgcggatatcaggacgcagggtggcttatatggaggtgcactccaggcggcttcctctaatggtcataaagagatggtcgagctgctattagccaatggcgcggagatcgatgtcaacgctcagggcggcttagatggaaatgcactccaggcggcctccgctaatggtcataaagagattgtggagctgctattagctcatggcgcagagattaatacacagggtggcttttatggaagtgcactccaggcggcttctgcttgcggtcacaaagaggtcgtggagcttctattagctaagggcgcggagatcaacgcgcagggaggcttatatggaagttcattccaggcggcttccgcttgcggtcacaaagaggttgtggagctactattagccaagggcgcggagatcaacgcgtagagcagcaattatggaagtgcactttgttgaaatccatactggctttccaatacgtacggcggttcaatggcatatatattcctctcacttcttgtattatttggatctgccacattgaatgtagcgaggtttccaatgaaagccttcatgttgatttcgtctagcaatatgtgttggtgaagatatgggatatgggggttgttacagggacccctccctgcctgatttttcagtattcggcttaccgacctccacaccgactttgtgtcgaactccggtagatacctacagcatgtatataaaccactaacaaaactaagtcacttttatcacatcgtcaacaactaaactgcttcaaaaactactccaaaaactaccccaaaaactgctctagcatcatcaagggattaaaaaatgtaggcatgagataatatacacgttttttctgatcagaatgtagggttttttgacaaaagtgcagaatcaagtctagcaaaattgatggttgattagtaagacaggatactgaaaaatcagacaggaggccgaattagcaatggggtccttgtaacaatccccaagatattctactttgtgtaagcttggttctgaagcagatagggaaaactgaccgtgtctaagttgtcaacctagaagaggatacggaactctcatcatcggacgaggtacgaaggcgacatagacttatgtactgagcctcagtgctttcacctccgctttatacgctgcatgaacgatcgcaatccctcgtgttcgagccacaggctctagctgggctattgcggacatctacatagctctccttttatagatatggcggtatatatataatctgttcagcagaaatccgaatagtcctagtggtcgaggccattacattcaagacaaagggtaacgccaaggacctttatcgagaacagtacacgtctataggtctctatgctaggtgtattggaaaataccaaacaccatacctctctactttctttatcttacccccacgcttcaacctcatcaaactatggggtattagtagtctcggctcccgtccgtgatacaccaactgacgagtcttgggcttccaacttatctgccaagctaaccttaagcagatagaccaaaaggaagactgcgataagcatttagatcatattcgggagatataaagatcagtcgatctatctctcgtcctgcagggttgtggaatggtagtatagccacagctcacgggggcaatctcgattgccagctcatgccttagaaaggacagcaagcattcaaacttggacatgcggtcctataatgttaatgtgatctcggtgacaatcccgatgatatgccccggacagaccttcctggataggaataccttatctgggctgtagcgcattgcccatgtgagtcaatctaagccgagacgagtactttgcaactataactttagtttcaccgactattaaagaaagtgcttgggttcaatcatgtctttcacgctcgtagaccataattcttgtttttaaatttgaaacctaacagtaatttcaattaccttgtttgggttccggctatttcgtcaacatattatgcccatgatgaatcctttcagcgtgctgaagcaatatatctggaactcttcccaaacccccgtcaaggacatcaaggaagaggtattcgatccgaaagtatgtacatctagagaaatatcgacgcttaaccgaaagaccacctctaagttctcatcaaacaggtgcacctcaactacaccccaccttcaaaaagatttacaatgcaagaattgcttttaagccagagcccaaccgcatcgccaattgcaggaacagttccattcccattattgtctgccgagggtgtcaaagcctaccggagagcgctattccaaaagaatgtcatagacaaatgtgccagctcgccatttccggggactttagtcctccgcgacgcggtgaaacagtcaaagtttgtcaatgacttttggaggcaccccgagacaatgaggattgtgtctgaagcagtcggtgtacctctggaggtggtgatgccaacggaaatagggcacactaatatccaagttgaaggcactaccattgcagaaatggccagtaatctcaaagctgagccggcggtagaaaaactcgagttgagtctcgaagaccgaacttacgaccctttgaaagatgcaagtgccatcattccgtggcagtaagttcataccctggccgccttgcttgtagcactgacgagactaactggctcaaagctatgactcgtatccttacgtttgtgtattgatgctgagcgacactgagggtatgatcggaggcgagacatatatcaagaagggagacggggaagtacagaaggtgtgtaagaaatatacttactgaaactaaaattcctctgctaaccaagccattgaaggttgagggcccccaaattgggcatgctgtcatgcttcaaggcggcgaagtctgtcatctggctgcccgggcgaaaggcgtcaaggagcgcatatcgactattacttcataccgttctacaatgccaaacgtttacgactccagctatattaccaacgtccgcccttatgcggatacaacctctctctatcctgaatggacacaataccgcttgcgaaaattaagggacgagctcacccattatcttgacgagatggagaaagacgaagagcctgccaaagagagaaaggatatacaaagccttatagaccagcagattgattatttacgacgaacctctcgacagatggttgaacctgagtatactcagcgagttttgagaaactatggcaggccgtcatactacgatgcacctagaatctgggagactgttcaatcactaccgggatttgagagacttgcatcagcggcggacgaggaacgacgttggcagcctgagagtatctattggaaagacctcatgagatccacggaaacaattcgcttagggaaaccccttcagagctctcttgggactgctgtgcgggagaagacaagaaagtactatatgggagatgaacttctgcgacaaggactcaatgaggcgttcttggattggttgggatactcaggtatttgggaactttactgcaacatttgattggaagacatcacgagatccgaaatttatgactacgactagttattacattacacaaatatattcgaacaagacacatctcctattgcacgccaagataaggatcagtcgtatgaagattgtctgtctgtagtacatagtatactgcaatatctgcaatacatcaagaatcaaaatgatattcgtaatttgattgtgttgggtcactggacagcccagaagagaggtgccatgccctcccccggcctgtccagcaacaactatataaataagcccttgagttagccactgaacagtccgaaagagaggtgccatgccctccctcggactacccagcaacaccaccctccatacattgaagttcagtttccatcatccaatacaacaagtataactcaatattcatctcctccgacatcaattcgaggcctcgttaaaaccagctggaagaaaaccccgtgggataaatacaaccagctggaaagagtgcctcgtacatatattgaatccaatttccgctcgtttcctttgttttcccttgaatttcctcccttgttttgttgtctttcgatatcgttttttttttaatttttgatttttgattgaatggattgcccaaagtcgtttggtttgttggttgtgccggttgttcgttggtttttgtcgattttggatatttatgttggcggtatgatattggtgttgatattgatatggttgatattgttttcggtgttgttgatattcaaatgattgtccgattggatgtttttctttcgtccgatgggcagttgagtccttctgtttgactcattgggtggtatgggttgccatgcccgttctcttcttcggagtcggttcaatggtaaaatggtggcatggcaacccatacaaatcttcttattcggggttcgttcgatgaatgggcaatcaattgagtccttttgttcctcgggactcatcgggtggcacggttgccacgcccattttcttcttcaggttcgaccggtgcgatttccaacatttttttacatttccagacggcagtgtcgagacattgtcaagagattgtcttgagctgtcgtagagctgaggcctcatcaaaaccaaccaggagaaaaacccgcatggggaaagcttcctagctggaaagagtgcctcaagtggttgtgtattgtagtaacaatttggtgtcaatgacaccgtggtgaatgcccaaccgggagaaaaccacgtgggaaaagctcccggttgaacgtgaagtgttcaccaagaatgttcaatatagttgcccgtcctatgggaaaaaccgccgatatggatggggatgagagagacttctatggacgttcaatgaaccagttccacacgatgtccacttcagctgcgggattttttctatacattaaagtctcaaaaatagaaatagtatcagtcaccaggagatttttagagcccaagttatctgtcccaaatgaggaccacaggcgccgcagtcctcacccagtacatcaacccgggtatcaagaatgcgaatgctcgatgtttggatagagacccgggccctagatctctccccaaacacggcaaagatgagagagagttagaatccaagttatcagccaccagcaaagaccacaggcgccgcagtcttcgctgaggacatcaaacccagatattgcaagttgcggatgcttagcacttgaataaaggctagggcccttaacccctacccaagcactaaggtgacgaggctttcaaaattcaaagcacacaggtagtttctcccagaataattcagtggatttgttaaattcaatgctcttcaacaggtgggagtcccaactgggacgaataacggggggcccgtcgtagcacaccgtgtgggatggttgtagaagaaaagaaaaaaagcagaggggagaggggaaggactgatatatatagcttagtgtgacgtaaacctcgatagtgtccgatatccaatcaagtaatcgacgtacgtcctgtgaaatgaaagtttagatgtccggtccgcatgagggaagtgtatatcgtacaaagacatagtacttctggtccattgaatgggctagtacatttgagaatatcacctgaacacttgcgacaccgtaaatggaaagcggacgaagttatttgatgactgaatcctaaaaatcacttgcatttttggtataatagctggccgctgttgtatacagaacggaaggcgaagtcaaaagtgcatacagaccacactgccatctcatgtgagaaaagctaaagaaaacccaaaagcaagtctagaacgaaacaaaaacaaagaagagaagcatgtctttacgaaaagctgcattgatgccttgtttccaggccgtgaactgcctgtgacgatcagggcacttgcccttcctgatcttcgactgccgtgctcgtactcactgaaataggaaggaacaatgggacagagtcgttccttcgcgattcagtaagcgaggtcacataaaacccagtcgcgagaacgcgcacgtagttttccttgttctttcttcctctgtacttagaattctgaatccaatgcaatcttttcccttggattgaattggcatgtcacactgccctactctcttagattacgtatttagcagagtccatatcctctactctacacatatttcaaggggattgttacagctcattgctgactcgaccccattagcaagacggtagatacctacaatttgtatataaaccactgacaaaattaagtcactttatcatatcaactacttcatcgtcaacaactttttcaacaactgttctatcatcatcaagggaaacatgtaggtatgagataaagtacacgttttttctgatcaaattgcagggttttcataactatctggtagatttaaagtgatgccttctatgtaggatagaataaggcagaatcaggcagagggtcgaattagcaatgagggaattccctgtaactaacaatcccctatttcaatactcattgaacaaaaaccactttctccgtcttcgtcgtcttctacgtattcaagactctccctctcaaagacagaacgcaacacagagcctatgttgtatagggtaaatgcgatgtagatctggagaaacgccaaggcttatgttagcaggattgctatctccttcaatgcacgatcagttcgatcttccctccatcacgtcagccgtgcatcctcgttttgcgtgtgctctacatatctgtacttgacttacgttcgttgaagtcttgtcattcatttaaccagcgccccctcgaaaccctcgccactcgatccccttcaactttttttccggtatccactacgagatgtccgacgacgatgagtactatgaatttgaggacgaatacatgtacgaggatttagtcccagacatggtcgtaagttcaatctaaaacacctcgtccgactctgccatcagtgctgcgcgagaaaaacagcgtcaattcagaccttaaccaaaaatttgcttatctaggacgacctcgccgcttcctcacactacgaagccgcgctatatgaagacccagggatcgacgtcgaagaatacttcagtgactgggactattattcagacgattaccacgatgatgacgcaacggtcgaacaaagcgcagagagaaagaaaagaaccgagatcgcagcgacaacatcacgacgaacgaagacaccttcccgcccaaaaggccacatcgcccgaatcccgccgacgaaatccaccctgatgccggatgtcgcctccttccagggcgtggtgtggaaaacacccgcgctggaccgggaccaggatgtcgccattttgtacgaaccggacacgggcgagaaagtcgcgcttctagagaactggcgggaagtcttcaaattttcccagccggcactggataggtcgcggttgaaagggcgacacgtggttgaatctaagcccgtcgattcgtcgctagctgacgatgaatctgatggcgcggacgacgagtctgatagcgaggacgagatgtcggatgatgtctcgtcgaatgcctcgggtgttgatgatggggatgctggggatgcgtcgaatacaacttcggacccggacccggactctttccgctcgctgaaactgtcttcgccgccgaaggtcgtgattccgttgaagagggggtggaagcggaaggcggttgcgctgaaggatgacactgacgatcaatcggcgttgcctccacagaagagggttgaggtgcggaagggcggtgatgacagggctacaaagtgtggtgcgacaccgccgatacgcaggtcgaccaggcagaagaactaggacggtcatgttaataatttcggatgtatggctatttacaacatgtacaataaatgaaatgaatctgcatatagtcttctaaagagatggcattgcccaaatgataatttgtgtataattctcttgcttaagcatactccttgttgaatgcgcggccaatgaccattctgcggatctcgcttgtaccagcgccaatctcatacagcttcgcatcccggagaaggcgcccagcaggaatctcgttgatatagccggttcctcccatgagttggatggcatcgagcgtgcattcagtcgcacgttcggcggcgtagaggattgcaccggcgcagtcatgagtgcgcacggccatctcgctaggttccacggcggcgttgtctacatgccgtgccgtaacatatgtgtacgcacgcgaggcagccagcttagtgtacatgtccgctagcttgccctggaccagctggttgtgggcgatcggtgcaccgaattgcttgcgcacgtgtgtgtaaggaaggacgaggtcaagcgcagcttgcatgattctggggagtgttagaatacgagagttgtgctggggtattggatggctcaccctaatggtcctgcactcaggacgagtcgctccaagtccagaccctccatcaagacgcggacaccgcgatttaactcacccaggacgttctcccggggaacgaaaacatcctcaaagatgagttcgcctgtgttagagccacgcatacccaacttgtctagcttgcgtgcgcatgagaagcccttgaaggtcttctcaactatgaatgctgtgatacctttggagcctagttcaggcgctgtcttagcgtacacgacaatgtaatcggcatcggggccctgtaagaaggtgtgagcaatgtgatcggaacttcgaagcccctctatatccccaaattacttacgttcgtaatccacatcttagttccattcaagagccagcctccatcaacttccttcgccgtggtcttcatgctgactacatcggagccagctgaatgctccgacatggcaagagcaccgaccttctcgcctgataggagaccgggaagaatgcgctctttttgttccgtcgagccattgagggagagctggttcacacagagctgggagtgggcggcataagagagaccgatgcttccttttatccagaatcgaggtcagatcaatgttcccctcagccatatactggaagacataccggatgctcgactgatctcctccatcaccacgcagtgtgcctggtagcccatacccaggccaccgtactcctcgtccgctgtgacaccgaggaaccttgatatatgttagtatgcgctgtataacacactcccttcacaaagaagagagtcaaccatttgagagaaccatacccagcatcacccatcttcttccacatttccgctgggaactcattctgttcatctgtccgtgcagcaacatcggctgggatctcacgccctacagcaaggttagaagtgcgacttgggttagagcatagataatgtacttgtgaaatcttgcacgcgctcccgcagctctaggagatcactctcggacggaggtacaaagcccgtggggtgttttgttgagatagagcggaaatacggggtaagtgcggggatgcgggttagccgtaccgcgcgtgttgaggtgcgaaggagagggagggttagggacgccatggttatatgagaaaatgtagaatgcaaattccggggaagaagtgtctttggggaagtggaccttttaaagatgtgtgtgcaagggggatcggtagttcctcggcgcattcaggctcagacacttgttatactatgagtttcccaccttgtaacgagtgatgcttttggatttcagatactagaacctctctataagctccttgatttcaaactaattcgttcttctattctatgctctctctccctcaccaattgctcagcatctttctgttgtttctcagcattctcatggccctcgggtatatgcggcaattgtcgcatctccgcatttgaggcgaccccagctttgtggcccgctttgtgccttttcgcttctctcctgctgtttcctgttcgtatgtctttgaatactccggggaactcctaatatacctataattccctcttcagtttgacttgggctgagctctgccatcctcttctcagaatcagctactccacacttttccccgcaatgcgtgtcccgtccccgctcgtcctccaaacctggggttgccgactcggaccacggaaatgtctcaactcattccgccagtcaacaaacattacacgaccagcttatagaacagtagcaagttatacacatcctcaccatgcctcagccctctcagtcctccccacagcagtggacacctcctcacaggagtaccgcgaaaacagcgaacaaatgcaaaaactcctcgaccagatgaacagtctacacacaaaaattgcacgcggaggaaatgacaaagcgcgcgagaagcacatcgcccgcggcaaaatgctcccaagagaccggatctccgccctagtcgacccaggcacctccttcctagagctatccgcactcgcgggacacggtgtctacagcgaggatgttccagcgggcgggatcatcaccggaattgggatggtcgagggtgtcaactgcatgatcgttgctaacgacagcaccgtcaagggcggcacctactaccccgtcacagtgaagaagcacctccgcgcacaggcgattgcgcaggagaaccgcctcccctgtatttacctcgttgactctggtggtgcaaacctgcctcatcaggcagatgtgttcccagaccgcgatcacttcggccggatcttcttcaaccaggcccgcatgagcgccctcggtatcccacagctctccgttgtcatgggtccctgcacggccggtggtgcatacgtgcctgccatgagcgacgagaccatcatcgtcgagaaccagggtactatcttcctagcaggcccgcctctcgtcaaggccgcgacgggcgaggaggtttccgccgaggacctgggtggcggtcagctgcattcgagcatctccggtgttaccgactacctggctgtcgacgatgcccacgctctagtccttgctcgccgctccgtcgcgaacctcaactaccctatcacgcccactccgctccggctggaaaacggcaatggagattcgcatgtcgtgaaagaaccgctatacgaccctaatgagctaaacggaatcgttggcaccaatctccgacgccagatccctgtccacgaggtcatcgcgcggattgtcgatgggagtgaattcgccgagttcaagcgcgactatggctcgaccctggtaacgggctttgcccgcatccacggccaccgtgtcggcatagttgctaataatggaatcttgttctccgagtcctcgctgaagggagcgcactttattgagctttgcgctcagcggcggatcccgcttgtcttcttgcagaatatctccggttttatggtcggcgctgatgccgagaagggcggcatcgcgaagaacggtgctaagcttgtcactgcggtcgcgtgtgccgatgtccccaagttcactgttgtatttgggtccagtgctggtgctggtaattacgggatgtggtatgtttctttctttctccttaggctttctgtagtagttcttctctaactgatattgctctagtggtcgtgcctactcacctcgtcttctctttatgtggcctaatgcgaagatcggcgttatgggctctgaacaactctcggccgttatggaggctgttggacgaaccgctgatccggctttgaaagaccgcatcgaccgtgaatctgaagcgacgttttcctcggctcgtttgtgggatgatggtatcatcccgccgtctgagacgaggaaaatgctggggttgggtctgacagctgcgctcggtggcaaggctgagccggatgtgcagaccaggtttggtgtcttccggatgtagggttggatcgaggcatggtcatttttattcaaataattcgagaaaatatagaatagaagacatctgtttatgtgccgttaacttgttacgacggttccggatagtcaaatggaatatgcggtggacagtcgctttgtatcaaattatgtagccttggcctctatagactatcgttctttagtctagtggacttctagaattgcacggcgcggtccaaagagcgcatcaaaggaaagtgtttgaatcgcacaagatatccggtactataatttcactcctttatgttgacggcgaagggtccaaccacaaggattgtagcgtgagcctatcaaccaaacgataatagcaacaggaccaaaagaaaagaaagcacttttttccatctcttgaaagtagtctttttagagtccagagcaaccaagcctcaatcaaatatgtcaaataataaaaagaagtatgacaccaattgtgtacagcgcaaaaaaaaaaagaaaaaaagaaaagatacaaatctgtagctgcgaagcatggttctataggggtgaggagaggagaggcatagacatatcggcagcatatagaaagaacatcagtcatacatgacatgtcaaaatgcatagcggcgtcgaataggcatagatcgcagagggtcgtatcgcatgaaaatgaaacaagacaaggggcctcggcgccccttgaattgctaaatcaaaggatgacacacggaccgcggcggtttttcggccggcgattgtctcgcttgcggttcgggccttcgcgctttcggttgggatcgttgctgctctttgcggcctcggagtctttgcggatgatctggcggcacagatcaacgaagacttcgttgacgtttgcgcggcgccgggcagaggtctcgtagtatggtgcgttaccccatttctgggatagaccgaaggcgcgagcgcgtggtacagcgcgatcttcttctaggtcggatttgttgcccacgatcacaattgggacgttctcgtcgtctttgattcggatgatttgttcgcggagctcggagagttcgtttagggaggacatgctcgtgatggagaaaacgaggaggaatccttgaccttgtttcatgtagagctctctatagacaatgttgttagtacggtgtgtttttcttggagttggttcgcagattggtgatggatggagtgtggctagatttacctcattgccgcttgtgggttgttagcttcgatctcacatgggtagatgtgccaaaaacttactgaactgttctgttcctgcggtgtcaagacttcgaaattttagcatcatgccatatccaaaccaccgaggtactcacatctccagtatacattgtcgaccctatcgagcatggttaacggccgagtgatttccagcgcgtagtagacaacttacgtccacctcaatctgtttccggtatgaatcctcgatcgtagggtcgtagctttcaatccagacattttgaacgaattgggctagaaggcgattgttgctcagcttgaggactcagggcagggtgcggaacacagggaacgaacctgttagacaactttttccaacacctcctgttatcgcgtcgcatgggaatgcctgtggtcagcctatgacctatggaaacatctcaggaggaaaggctcctaccagcacccaacacaacaatgtggtattcgcgtctaagcgcaaacaaacaattagaattggatctagggacattcaaggagtatcatggagtatcatggactcactgtggccgcattgagaaaagtgtgtatcgatatttagtgattcggaatggaaatcgaaacagctctcgaggacgaaggtcaggctcaaggtggatcccacgtggtatagatggcgatctcaaatcgtagaacagttggctatgagaaattggcccataaaccacgttgaatgcttcaattgtattgtgtagctcccttgggggtggaagagctcaggagggcggtacgcgggtgtggttacatggcccgcctttgcgtagacgggggatatggagattcgagtggttcgagggattggagggtccactggagaaatatcaagacatataaagtaaggtaaaggtatttaggcgtttctgcatgaatttttttaggggaggggagaaggtctgataacgggagttatcctaattgcatctcctgtcccttcgacccaatcacaccatatgccgaggtcgtctctggcggtcaggcgctaactgtaagtgtatgtatgctgtcggtcttttcagaatgtttgctcctttcttttggggtcttcttggtcttttttttatcttttctttcccgattgcaactgctatccctgtgaatatggatcacgtgactcccctgatatgccgtcccagggtcatttgtgtttgaagatactcagaatcggtcatttttctaaattttcagattgatacctcatgtttgagaaaggaagagtgtgtggaaatagggcaatgtttctcaattggtcagttttgataggcgggatctcgggggaagcagaaggatgcatcacatacgaccaactactgcaggggaggcccacaaagggactctccccggtttcatgatggaagaaaaaaagaaagattagaaacgcaaacaggtcaacgggtaaacaagttatttggtatagccctcgatgatcttgggaaaagccgcgtacgtcatgtcgtataggatgtacgatctcgggagatttgtggaggggccaacggactggctctgatacattatactccagatgttcgatttgaaatctgttttaaggtacatcgatacatagggctatcactgctgaagcttaaactcgctacaggccactaatatattccccttagcccctcaattaggcactctagcagacggcatttatgaagatagaagtagtatccatagtcatctgcacgatctccaggtgtagatcttctgatcatatcgatatactccttatatcaagccaatagccttggaacaatttactttgtccagcttcataagtggatggatacgtcatgtctatcacgtgatgagcacaggctagccagcctctgtcctctttgccgccgtcttgaccggttgcattctcaccatccctcactccgttctcatcctattagctttctgacttgttttcccacaaacgatacccttataagcaaaaatggcctctttccaggaacgtgcccagcactctattgctcagctcgacaaggaggtacgtttccagccattgttgtgtgtttcgctgtcctcctaggtcaaaccctcgcctggtggctgcaatgcccctaagcgatagtgaccacagcaggagtatctgcaatcacatcctttgatacatacttcactatagtatctatcgctgtggttttgagctaacatctgctatttcgtagctctccaagtaccctgtccttgccaaccttgagcgtcagaccaatgtccccaaggtctatgttatccttggccttatcggaatctacttcttccttgtcttctttaacattgctggcgagttcctcgtcaactttgccggtttcctgatccccggttactactcccttaacgcacttttcacctcaagcactcaggatgacacccaggtgagttttttttttgtaaatttccccctttacacacaaattactaaccttgtcttttttcgctcctctagtggctcacggtatgttcacatgattttatcacctggttgttacaatcgtgcggaagtaatcaccgccgattgttatcatacaccacccacgtgacatatttcccgcttgcacgcgatcagtaattctaacatatgacttgatagtactgggttgtgtttgctttcctgactgtcattgagagtgccatcagcgctgcttactggttccgtacgtgcccacaatatgccgattttctgactatcttgctaactgatcgcagccttctactacatcttcaagttcgttctgatcatgtggatggcccttccccagaccaggtatgttactattccatgaccaagttaagaccagtagctgatctcttttaagcggtgcccaaattgtcttcaactccttcctccagcccgtgcttggccgtttcttcagctccaacggcacttcctccaacctgcgcgctcaggccgaggctgcgagcaagccccactccacttaaaggtgtgtagtctcacatcttaaccgagaatcgcgtcgacaataaaagctccgcggaacctgcttaggcgcaggttgcggatccgattctctgtgcccaagcacaaagtggagtggttggctcaaatgttcgttgtcatgattaaataggggtagtgcaatagctggaacatgaaatagagaggacccgagcaatgttgcaacgggtccgaggttggatattcgctcaatgtgagaatgctatattggttcttgccattttgtcacactcgagtggattagttgttagttcgtacattatgaatgtggatgcagttggtttcatagatgtgttcgagatcgacgttatctacattatctacatgtatcttctcagtgttgccctacgcgccatcgagctgtgtccttacaaagccgtacgagtgaggatgcttgagtatccatggatagatcgaaggcttggagaagaccgtacataactttgtcagtagttgccatccaaaatatacatcttgactccaagaactcaactgatacacacatgtcatgcattagtattatctgcgcactctatcatctaatgacctccttaaaacgtcgtgcacaaccgtccccgcaaatacagggtgaacggatcaaccccaagaagctggtccgatagctgctagtaaatatcaacatcccaatcaaagcaagtgaacttaacaatgacaatttcttcacattgggaatgattgattttgtaaacgcccgttcgaagtcttgtactcttccccgggtcaatatactcaatcaaagcagtttgttatgtattctcaatactcgagccgtcatatctgcttctgttggatcaatgtgatgcttctttggtttgcattggggtattggcacactgcatgaaggggtagttgtatttggggctaaatatcgggtgttgatggatcagatggaatattattggctaagagatagcactttgcttacaatctgcaggcttttatgcaggatgcagctccacagaatgtgttttagaaaatattacttcaaaccaaataccatgacggtctcgttgaagacacgttgtacaccgagatcacaaacctctctggtttatgatgtctcgtgaggactcaacagaaggcctggaataggggtttcatattgatttgaaaaaggatccatatgtactttacgccgcattgtaaaaagaaccagcccagccctttcaagaatccaaaaatacataaacacctaagcactgaactccagatgaccaccacagcacagggggtttgtacactcatagtaataaccctttttataacatctgacagatttcgtaactcgtatcggggtcgatcgcccgcagccatgtttcaccgaaggaaacaaaagcaacgtgtccggttggttgaacaatgatcggagcgggaacgtattagaattgacgatttagaggtatctcgtccaagctcttagttaaacagcatatctcagtaaagccccatgcgatttccccagccatcagcccgcgggttgacgacaatccgatagggaaagggattggaatcgctagtggtgatgggcgggatatggtctttatctcgattgacaacgctcaggattttcaaagctgccttttgcagcatatttcccattgccttgcgcaccttggctcgttctgtaaccaaattagctctggataaaaaagggaccccgcagactgtacataccagactcagtacgcggtgtcgcgatcgtcacatcaagtgtccagatctcccagcacacctcttcctcgcctttccctgtcagtccaccaaaccagtgccccgaccgacgtcgtttcttctcgtagaactcgactgcgatccgccctcgcacacccccgcccccaccgacaatttggccatcctgcccgccggctgcggaggacagatgctgccggaccagagctgatatccgtgattcaatcagtgtttccaggtctgcatcgtttatagcggggagtgtgaagtcgagcacgtcaaaggtgactggacggatagaagggaaataacggtggaagaagatgaggttcaggacgcctagcaggaaaaacttagcacaaacgacatgattaatatgtctccctcacaactgacccttcagtacatctcgcacatgggtggtgtccgcgaagatctccagaaagtactccggaggggttttgcggggctccatccccgccatgacgcagctcacaaccaggccggttgagtgcagcctcaaacggttcctgctggtgaaagaggaagtattgtcaggaatacaaaatcgagggacagtcagtaaaaaagttgttgcatagagctggaggggtgtaaggtggagtgatgattccgaggccgatatggcaaggggggcgggtctgtatcggacgtagccgactgaagcttatcgcttatcatcgaactggggtgaaaccagcttcaaagaggacatctatgttcaaggagtacgaagtatacggagtagaagtataaagagcaatgagaagaggacaagaaagagacatacagggcttagcgggttattgcgggatggccatgccaaatccggagctctaagatacgatcattgatgatttagagaaatgagtgaagatggtcaaaagtttaaagctgtaagctattgcaggtattaaaatcctctgtggtgctttatagacgcggttcacttacattgcatgacggtgagctctagccgaggcctgaaactggcgatcagcgcccgaagccgctcttccccatctactccgtacttaaccatccatctcccaaatatatcatgacttgggatcgcctgtcattttaacttcttccagagaagcaccaaacacaaatatgatcggtgcgacgaggcgctggttccagcgcaatcgcaaaggtcttgcaatcggggctggggtgataggagctggctatttggccggacaatacctgctgtctaagatctccgaggcgcgggaacgcatgagcagcgatcggattgctcgcgagaagtcagttttccttgtttttgatgactcctattcctccgctagcaagcacgcgagcttgtagcacgtgaaagcccgaccagcataccccggaccggaatcactgacccatggcaatagtttgcgccgacgattcgaacaaaaccagaccgattgcacatataccgtcctcgcgttattgccgaccgccgccgagaatattatcgatgccctcccagttgaggagttgaccaaggaactccagcagaagcgagcggagaggttggctcggctgaatgcaggagaggcgactgggtcagatctgagctcggtttccccgagtctgccggacgaggatcggaggagcctctctagtttccagagtgaaggatatgtgcacgcaagccaggccggcgatgctctgaactcggacgcacaacctcggcccaaacgaaacaagacacagctgtggaatgaggtgaagattacctgtgagtctgtttcgttcatcataaaacctcatctgtcagaaattaacgtttcttagctatcacgcggtcttttactatgatctacactctctccctgctcactgtcttcactcacatccaactcaacctactcggacgccggaactacctgtccagcgtgatctcccttgctacaccacctgcgaacgtctcgacaatcagtcttgaagaccacgatgatgaactcactcagacattgggcgatgacttcgagaccaaccggcgttacctcgccttcagttggtggctgcttcaccgcgggtggaagggtataatgggaagagtgcaaactgccgtagaggaagtatttggacctttgaatccacgcgaagatatcagtttggccaagctctctgagttgaccttacaaatccgcaagaaggtggaaggcagcactgaggacgagcgacgatctcaaaaatggctttcttgcttgcttcccccggcagaggaagaggaacatgtcttgcgcgagtcgggcgtggaaggcgtagccgacccaacctcttcccagacggcatcgaagctgcgacacctcctggatgagacggcggatttgatcgactctccctctttctcccttgtcctcacacttcttaataacgagggattctcaactcttatcgatcaaagatgtgccgctgacgccttcaaggcgcccacctctgcaccggagactgccccgcagtccttcgattcaattgccactgttgtgcccctggctgccaactcagagcgcaagacaaagcttgccaatcttctggctgtcatgactcgccaagcacatgtgattggcaatggtgcccactcaccaaatgagtatctggtcgccatggaccagaacgtgcgtgagctcgaagccttctctgccgtggtctatagttcgaacttcgacctcgagcttcttggtgccaataatacagcggtaccgactagggagacagatcttgtcgatgccgaaagtgcttcatcgtctttctccgagatgatagttgagaaagaagacaaagcagatttaaaggaggatataaatgagtcacaatcacgcaatgccttgcccgaggagccagccttcaacgagcctgcgcctgagccgttggcagactcagcctttgaagaggcttggggcaaggccacagatgatgggagcatcttcccagcaggaggaaaccagcccgcacagtaatacgatgaagataaattcaatcctgatggcgattgtgtgattctctacaaccttactcccttgtttttcgcacatcgctgtgggtctggttttcatctccactgcatacattatctttgcgatagaattgtgttatgttaatgatatatgtcagttcaagtatctattcctagttagttctctcgaaaattcctactagcgcaatatagctgtgcatgttttctctacgttgattatcgaggtcctgaaccctacggtttagcgagcatgccattgtacaatcctataccccagatcaaagtggactagtgtgagtggagcggcggggggcttatgcttggggatagtggcgctgagacacccaaggcgaagtcttaaagagattatggagccatattaggtatctgcaaataacaagcttggaaagcaaaggatatgccagacatatgcgccaatcccgctagcctcgggactgcaaattgtgacatgcagatgtttttgcgtctacttagtataacagacatagttcatactacatactatgtcctatatcgcacctttttttccccactgtcacaatagtctctgtcctcgaccggtgccttgttctgaatgccaatgtacgatcaggcacaggtacttctcctttgtgtctctgtacaaacctggatacgctgaaacatcttgacgtcatgactatatattttcctttcgcagcttccgagctccaccaatgagctaatcaagcccacttcgtgtggcgcagctgtcttttatgtcgcgcaattgaaattttatcgtatttgactatacgggagatggactacacatgtattgaggtagtacgtttagggcctgattttcgccctattaaatataaggggttgaagcattgccttaactatgccctttctttcaagggatagtccaattatgcattaatacagccctgggagaatcaacccgtagctaacaagtactctggatggcggctatttggagttatttccctgtacgtggtactccgtaaaaattcccctaacgacgttttctcgcaaggaggtataccccgcagtgcgcacaggtgcaacatgcaccgtgcaagtatcagccataataggggccggggccgatgacagcgggctgatcattgggctgtatcgacctaaggggcttagatgatgcattagaagccaacacatcccataataaaggatattgtccctgaatttaggagtatatacggggcacggaatagcttatgcttatatgcaattaaatatccaggcaagcattatttgagcaatatagcacacgcggcagtccccactcatatggtcgttctgcctatcaaaaagggcttgatcttcgatattccctcacaagagagggctaggtctagtagcagatactcgaagttctgaaacgctggccagaattcaatcgtctctactagggacgacacgtgggccaagtacatctccatatcggttggtgaatccagcaagatggatgacacagtgggccatctagttcgatctgatcggcactaacattatgaaccagcatcatgtacttatcgcttgcacgagtggcagcagataagcacaacttgaagtctctcggggtccccgacactagctgccatgctgtcatttccaatttcccgcctaaactgagactataggacacagggcgcctgtaacggacatagcaggatatctgactgcagtctctgggacataggagaagacaagggcagtgtaaactggcattgtcgatagggtacttgttgcttcggagttaccggcggctggatggtggagccggctgatggctgtagcccctgttatgtatggtgtacgttgactgggaatctagaggcccatgactcgtaccatcatactaagcattttcgagaagactcgttagttagttatcctcagtgggaataaccaaggatcctgcgaatatgatgtcgctttcaagtgttcacatgctcaggggtaaatttgtagggatggcatgtcaacgtagcatttatccatgaggaaaagcctgttgtgaaagaaagacatttgacatgaagagctggagagagacaacaatttgaaacatcttgaactgtaaccatataccgtaaagtacccagcctcaggtgtggctgagctaagtactccacccgcaaaattgggtgggaaggtacttccaaggttcctccgccgtgttccgtatcgtccaatcaccttgctcgaccaaggaacggccggtcagagtcctcaaggattcccccgatgtgccctgtctctccttaagacctgcccatcccaaccattcctctgcattcgacatttattggcagactccagcactgatttgtgcttcttcgtaattcttcactatcactgcagtcaccgagatcgcaccgagatcacctcacgattgagttcaggactttgtgtcgtcaccctcgcctcaaaattaccccgaggatcaacccattgcacatctacaacgccttggtgccattacatatcgaaggcctttactctcagtcttccgcttaagacctcccaaaggggattgtggcggctgcatactgcagtgggcgctggggccgcattatctccctatccgccagccgcgcgcatcggaaacgcagcgtttcaagtcatcgtcacgaaccatcccacatcctgaagtaacagccagtgcacgtgcactcacgaccaaaccgaactcctaggacagcgacctcgcacattgggatattaaggccggtgtactatcccgcccaacatgactgactttcgaatgcccctccatcaagggcctcctactcggaagcccctctctggtgcccagcacgcgtatggtggatatcagtcctacgattctccccgacctcaacttgcgccccatctagcgagcccgcagaccacgcacagtcggactcgaaccacatcctccaacgtgttgccctactcaagcggctctcagcattaccacggcactccctcacctcctatgtctcaaatgactcttcctcaccatccaccatctcgccgcatgtctagcaccactacctcgacctcgtctaccagcaaccacccggtacacacgggaaacagtgtttctgacatccgacgaactgcttcggctcgctctgccaactctcagcttggatatgtggcccttatgcggcggcaaaaagctaccgtatggtgtgaccgggcacaacctgaagacgctagattgcgcgaacaagccctgcgggataagaaacgagcatacctcgaagttcatggctcaggcgctggccggtcaggaaccttggctagtggcaagattcgacatggtcctaagggagctgctgaattttcaccctcaaacctagtgggcgccaaagtccccgtgcgactcagcgcgaacgagatcggtgatggggacgatgacactctcagcagcgagggtggcgcaattcacagacggaccggtagcggccgcagctctctgggaagtgcccaccgctacccaagtggatactcgcggacaccgggaacaatgggcagcaacagcacgcctccgaacgaaaggacggaccttccagaagtatccgaaaatacaccggcggagattcacgaggaagaaaagagccgactgtcatacctccacaaagacgatgccgccacaacacacagcagcgaacaagagcaagaagactttgttggcgacatgttgggtccgaatgccggcactgcggcagccgataaagccctcaaagcatccgagttacgacgacgaggcagtgtagacgagcgaactacttccatgaccaatgtgcgactttttgtcgcaaaccccgattcagacagcgactgatgccctcgttctcatacggcgtctgccaactcttgtatccttcatctccttcccatatcgccccgccttctatcttttatgattttcacgtggtttctctttatgcctcgtcaactgcacataatacctatttcgttgcaactccacaccgaccccatttggcaaatcttgatggtttagaccaatgcgtccttctgctttgtccatatctttgcacgtttgctgtctgatttactccttttcatttaaagcgccacatctctgtttctctctaggcttccctctttcttgtcttgttgtatatcctcgatcgcactgctggtctccatagattggcttcctggcttgtcttcatccttctccggctgcatacgggccgtcctggcgttcgtcatatggcctagcttctcttaatttagaggtagtacctaattttcaaaccaaagatcatctcaatccgtcttgcatttgggataacttgtgtggagtggtatgggcttttgttgtagcttcttgcataggatagagcgaggtaattaaaccacgacagtaacagaaggacatacgcaacttgaaaatattgaaaatattgaaaaacacacaacaccatactcattccatattgaccttgggagtccacaatgatgccataaattgtacagcatactgaaaacccccacataaaacggcgcccatcgggcacttgggcactcggccctgccccagccctggaggtgggcacatatattggttacataagcacacacgtgcttatcggtcgcgagcgcgaaacgattaacgcgtcccagtgttggcccatctactccgtactccatatgttcatcaagcagcgaagtcgatattctgagattgaagaccaattgtcttttgtctgtcccttcaagtcgcgctttcccctgattggcacgacctaaaccactcatgaactgaagtcgcgatctatcacacgacagtctgtccccatcgccccttcctcacctacctacgctcctgagacttcggattcctacataaccaactctttccatctattctcgtatcaatggtacccaagacatctctatcgccgatgcagtcggtccggtcctttcccgcaccaccttcaccttcatccggtccccgaaaacgctcaattcacgaggttgatgatgccgatataccctcgccaaatgcgaagcgaccattgactgatttcgacggcggaaatcaagaaaatcgcgatccatctcttgcctcccagcctgccaacactacttccccgcaagttcagatcaagcgtaatcttccacctcccccctcggtcgaaatcgtgatgagaaggaccatacataaacaaaatgaagatggtgctggggaatcaacatccccaggcaccaatactgcttctaatcctgagcttggtacgccggcctctaagaaacgcaaggtagtatctgctggcacagattccaagcaacaagaaaaggaagccaaagagcgccagaaggccgaggagaaggcggaaagagaggaagagaaggcgaagaaagaagaggagaaagccaagagagaagaagagaggcgcctgaaggcagaggagaaaaagaagcgcgacgctgagcgtgatgaagagaaacgacacagagaggaagaaaagcgcaagaaagatgtccaacgtgaagaagagcgcaagcagcgcgacgaaaagaagaaagcaaaagaagatgaaagggctgccagggaagcagagaaacgtaaaaaggacgaggagaaggagaagaagacccgagtaagtggcattgacaattgatttagcagcaagcttcccatatactaaccaatcagtcacaaatgaaactgaactctttcttcaccaaaccatcggtaccttcggcctcatcaggacttgtattcacggctccttcgcctaagaaggcatctactcccgtcgattcctcttgcgaaactcgtggcgcgcagtctgactatgagcgagagtttcctgccttctttttacaatcgcatacagttgtggcaccccctcatcggttcgagcgtgacaccgaagccctcaatcacgtacacgaaacgatcgattcatgtctacgcaacgaaatccacacccaaacacatccattccgtcccacggaagtcttccagataattcctttccgtcgcgggcgtcagccaacgacctctgtcagagacatactattacagctacaaaggtctgacgaaactcagcctactcaaaatcagagcataatgccaacttcgaggccacaagaacttctacgtaaggtcacgatgaagtctctcaagtttggcgaggacatccgccctccctatcaaggaacttatacccgtcgcgtgtccgagttatccgcgagaagacttgcgcgaaatccttatcatcgagggctgccggatactgattatgattatgattccgaggcggaatgggaagaacccgaagaaggtgaagagctggactctgaagaagaagatgaaggcagtgaagagggcgaagatgatctcgaaggcttcctagatgacgaggatgatgcccttgccgagggcaaacgtcgtcttattgttggtgatctagagcctgtctctactggaatcaagtgggcggccaatggagtcgagcctgaaatggaggcctatcggatagagactatatccgatggggtcaagttccccatcgaccccttctcgactgcatattgggaaagagcaaagcccgtggatcaagtacttgggaaagcgcgacccgcgacagccctagacggcttccttgttcctgcagtcccaggggcagtggcgacgggcagtgctttacctcccacatcgaaagcgaaacggccattcccgccagaccaacttgcagagttcaaggaagctgttgaaggcagcgatctcagtaagattgggttggtcgagattttgaagaaacggttagtcctatcatctccgctaagttccgcttctattagagcatatactgatccaggtgtatctagattccctaaggtgtccaaagatacacttaaagctaccctggaccaggttgctgctcgtgtcggacaaaaagaagtggacaagaaatgggtttgtcggtgagagtatgctgaattacctacacgagtacctacgaacggagtttggatgtacctaagcatttgtaatgtcaccatgaacgattcacctatcatgatccaacagttttgctttttttatttattttaggagtcggggtatcccgggttagctgcatgaaatcaatgccggttgtgcgtgtcgtaggacgatgtatataagccaggatgatacccttgcatgtgcgcatgttgccactctatgacatctcgtatttctcgccttttaggcctcagtgggtgatttaataggctctccgatccctatttagtatgtcgcacatatgtgtaaaataggcctttaggatacgtaagagcagaaagtacacgtctataaaatccgaggggcgcatgaggggcgcatggacacctcattccctgcactgccaacgcatcgtctcgttgtactcggtacctggccctttaaccctgctagcgtcgttcttataagtcgtttctacttggcttttggcacttttgtagtctgcaactgtccgttccgaggattccttttttctattcagaatcccggccttttttttctggttttatactccgggtttccattagttacctatttttacttggatttgaaaacaaacccttcttccctccttatttttttcccttttcctcttcccccgccttttcttcccacacagtcatcctggaaaccacctgttccgccgatcgagtgcagtgtcactctgagcacctgagtttcatttcagaatgcgatagggatccgtcggctagggggggtttgcgactgtctgtcgctaatggcaagatggtagaacaccaagaggatcattcgtcctctttgcattctacaaccagtacgtcattatgtttttgcgcattttctcccttatatggggctgggacgctgaaagaggggcgctcctatctttatacccccttattgtgattgcagcccaatctgaccagctccagccgagcaaatacctactttccccaaggttaatacaccatgtcccttgtcgtatcgggcgcaagatcccgcatctgtgcctttacctccttcacctccgggatcgccagtcatgtcgcccacattcgtcaaatctccgttgaacgtggggccaggtgagttgggtggctcgggccgtgccagtgccacggtagtggccgctccttccaatggacacaatcccatacccgcgatggcttctatcatacctgtacccgtggaagatgtccctcagatttcattcgaagattttgccactcgctaccaccagaaccagcgcaagcaggcccaaaggaagcgactggagaagcgcctgcgtgccaccaaagtgtccattggcgtctctgcgcgtatggttcgtgtcgggctgactgcacagcgaggtctcgtcgaagccctccgccatgatgacaaagccagttttgttgctctctaccatacactccaagacctccaggaatcatgctctgcaccggctcccaacgatggccagaccgaagactccatggacggggagccatccttgggaactgacattggccgtttcccggatttccttcatcagctgagccctcagtctcggacggacttcctggaaattttgcggctggtccgctctgatccccagtttttggtcgaccggttgcaaagcctgtcgtcgtcccaattggctgcttttacttctcctgccactgctttggataccaatgatcctgcgtttccttccacctcccgggcccgggcccagtctttcttgaacaagagccagactcagtccactgccttcaaggaccacgcttatgcctttgagaggactgacccattatctgtacttctttttaacgtttttgccgctcccttggacccagggacgtctgaagcccgcttgcgtatggaagtgtggtcgtccgtctgcgctcaactaatgtccaacggaagtagtagatactatcctctgatcggccagatcctttcttcctggaccaccgacagcacttggaaagcccgctccaagtttgaactctacctgatggacattttacaaaccggtgcttttctcctagagcccatagccactccacccggactggattttgccatggattccctggaccccatgcgcacggatgttgcagaggaattctttgcttccgctgtggatggcttgttctctgtacttgatgacccggacggcggctttcctcacgccgtgctgcagtttgcaagagccgttttgcggaagctgaataaccccgagacccgcaggcgcttcctggagtttttgtttctccaatggttcttttccaagttcctctatcgcgcattgacctatcctgaggtatataagcctctagcccttggtgaacttgcgaaactgactccaatttgttattgctttgatagacccacggtcttctcttagatttccatatcagaaaggatgcccgcgagaaattgctgaaccaggttggacaccgtgcctacgctcaagtctttgctgttatgcgttcaatgtacgtcacctgaatcctctgccgatgcgacactgttgctaatatattcaaggaatcatttctcaccccctcgtccgataatcaaggacagtatcgagaacatgctctctcgattccatgacgcgatgccatcaaaggtctcgattgatccttctattccctcttcacaggcaccacttcgacgaaagtcttcttcaactttcttgatgatgtctgctttagatgtcctcacactcctagacactctcttccaacagacgccttcttctttgcattcctccccggcatctgcaggagttaattcttggccatccagtccaccatctttcaatcttcggccagactcacttacagattctggattcgctcgtttcaagcacgacacaagttcaaaacatacatccaatatcggttctatattctctatggagactcattctctcttcccaccggaaaatagcctgtctgaaaaggccgctcgcattcgattcgaactaaccgacttagaccatcccaatgagcggttgagcttggagcatccctccgatgagcattggactatcttctcagttgcagcagacggccatggcttaacatggagccttctccctgatagtagatatgaaacgtccaagggcccgattatcgaaagtgaagatgatacccagtccacgacgctaggactggaggaaaatcacgaagcattacagaccgcgatccttcgacttgtccaagaaaaccgcattcaagatgtgggcgactatgaattcgtttcacggaatactacgcagccggccgccatgtccttgaagcagcggttcaacgaagcgatgttctgctgccatcatgactctgattttgttggcgcacactactggtggaatgcttcacagcagcttgggcaacggggaatacctagctcatcgaggtcgacagacgattcatggatcttgggcccgatgcatgagaattatagtcgctcgctgatccaatcacgagctgtcattgagcgttgcgagagtgactttgtgtctctcgatcacagtctctgccgactccagactcaagtcaaagacctgacggccaccttttgcaagatccgagacaagatgtggtacatgagcgacgtcaagaactccatcagatatgaggaggctaaacacgtggctatggctttgaaagcgatgatctactcagcccgtctcttcaaccagtaccccgaagaacagcgttctcgttacggaacacgttctttgggtggctctttgttccagaaacccgaagtacaagttatgaacatgatgaaggcacccagtagccagggtggaccgaataagctgtctgacgagcaagtcgagctgacccagaaatggttatcgcacaacggcatcgacaatttctgcaagggagaagaaagaattcatcgattctgctacgaggtccgaatgagcatcaataaactagtgggtgaaacgatgaccgagacaccggtgttatgggcaagtgaacttttccagacggaacgctcgaaatatgaaggttactctcgcacattcccaggaatgtccatgccgagcactcctcggccctcaacgaccacaagcgaggacacaaactctgcttcccacttctacggtgccaatatacctctgctcgatcctacgtctcgtctttctccggatatcccgtcattgggtcacaagccctctttccaaagcattatttccgataaatggaggcctcagcgtgatttgccttcagttgacatgtcttctctcggaggctcaccaggccgtgctgcttcgacatctaccggtgacacctacagtacattctggtctgcacctcagaagcaccctatgtatgccgcaagcgcgtcgagcgtgtactcgcggccaccatctatgttcagtgagacggcaacccgtcagccccgtcgtgtcgaacgcaaaccgcatgggaagacggtgttcatggatgacttgagacagacactaactagtctcctcttgagcgatctgggctctccggtatggagctgcggtagtgagactgacgcctggttcaccaatgcgctgaaccagaaacgcattcaggtggaaatgcgccgacgagctgctgtccagaaattctacgtcgattatgacgagcgctctcagcatcttggtcagcaacgtggttcactgaaaggtcgccggagcaggtctatgggtaaccttcgtgaatcccaacacaaagctcctcgtgtggagccctcgtcgcagctaccgcagacatttatggaatcggacggacagtcggcattttcatacaaggcggtcttccgccggctgattgaagtgttctcgcgtcatggaaatccctttgtgaagctcaacgcgttgcgggacttgcgttccttggtggttgcgtcgctcatttcgccccaagatgccaattgccctactgatatcaactcttccccgggcgaaggtgagaggatgaggagcagtccgcaacttcatcgggccactcgccacagtttctcagaggtgcggcccaacaacctaccacagatggacccattgcttccttcctctcctcccgagtctgtcacatgtggctcccgacggtctgactactctactccgtccgaagcacaaattgtagcagctttgcgggatctcatcctagaaatgaagccgaagacccttttcagggacctacagtttatctccgcgttcgtcccaggagatcagctaaacaagacggattgcgggacagcattcctccaattcggtctggccgcactgagcctcaaagaagagatctgccacagcatggttgaaatcgccgaccgaatcgtcttccaagagctctcccgtcgtcatacccctttcgcctccgacttccaatcccgccctggccatgctatccaagacgcagcgggaatgtggatcatcactgccaaagaaggcaacccagtcgcacaacgcgaacttgcaatcctttatctgacccacccggagcttctcccacgcgtaacactccctctgaccctcccccgagataccttcaaggcggagatgatgtatcgacgggacaaagactctaaatcggatccgcagagtatgtgtctggcgctgcactggatgcagctgtcggccagtggtggtgatactcttgctcggaaccgacttcgtgagcgtgaggagtttgactcaatcgcatgagaggctttctggcctgtcttttctcgttttgttgtgtcttttttcttctctcattctttctcttcgctggttcgattttatttttccccttttctctctcactctctctttgactttctttcctttcttatctttacatcgcgtcgatgcatatatatccatatacccctgttcgggcgatctagttgggtttttttaacattcgtggactttgagactcttgcctcggatttccgtctgcgcttggctctggaacatgactggcgttcttcaatacatcggaagactaggcggtttgctgtcttaatctcagtttaatgttatatttcctttcctgtctatttaccagtaatgttcgtatcctttcatgctagcttttgaagatcaggacgaaagcgtcactgacagtttggccagttttcaaggctgtcgtatagcattaaggaggaggttgcctggacaacctcacaatatcatgttcaacctcccatagttatctcccatctaaacgttagctaagctggatgcatcgggtagatgatcgggccgacgtcatcgagtggatttgcacccccaccaacttgaccttatacatcttcttcttctttcctttgctactcgtgactagtgactactgtgagctgactcttatctatctgagtcaggctcatttgattcatccgtttttccccgtatcagatcaggcggtgctcagcctcttttttttcccgcacggattgcaaaatttgaagcctgtgatataatcaaaataaaacaggccacatccttttgattcccctattccccacccctggaaatcagtcttcttattacctcgtccacttgcaaatcgggcgacactcggtctttcctaactaccatcccaccatgactaccgcaccacacatgccgggcaaggcgcacagctccgatgatgtgcaccagcggccaagaggtaagtccaaactacatcagcaccagatggtgaccgacagcaacgagaggatctgaccggtgcattcttgcgccaactcaacaggcatcctcaagaactccaacccattccaaaccgcctccgctccgatggcacccaccgctccaccctcggttctaaccatatctgagcccgaggagaccaaggacatcaccatcctcaacaccctgcagaacgcaggccggcgatcctcgtccacccgcccagggtctcagtcgcgccgacagtcatcagccagcgcccatgacgacaccgagccccgcctaaagtgggatgaagcgaacctgtacctcaccgagcaggagaagacagcgaagatgaagatcgacgaaccgaagactccttacgccccccactacgaccccagcgaagacgaggagcagatgcgcctcgacgatgcaaagcaacgcctcatcgatgcgcagggcctcctcgtcgacgagctggacaagtcgaccaaaccccggaaagctgtggcagaagatgaaatccccgacctggagctcggtgagcccgaggaaaacctagaggatattgctatgaacgatgacgctcgtgtcttccgtgaccgtagcatgagtatggactcgcacaagagcgagaagcatgttcaggtcggcggggaagatgcaaatggcgccgaggcgcctgagcatgatccgctcttgacgactgaagaggcccgcgcacggcacgctcatttcgagcagcagcggaggaggcactatgagatgaggaatatcaaggagctacttgcgtatgttgatcccggtgctgcactgatatctcgattttgaaagctgacttgagacatctagccatcccgaggatttggacgaggaaatggaagacaacgacggatcggagactggttccccgtcgtctatgcctcaaattcctgaacggttccgtaccaacggaaaatagagatggcgcccccttgtttttttcctgatctttccatgtgctttcgtatatttgggtctagcttttctcctacagcggggtggccttaggtgatttcagattgccctcgcgctagtctctccagtttttttttgaattctgtgttctgtttttctgtgtatattcccccagtgttatcgccctttgccgggatctttattcttgctcgcgtttagtctgggtttccacttcgcaaactatctcttcgctctagaccgaggtatatccatttgtggccctttgatccaggtaaatgaatacatgatttgccttgccgagacagatatagcatttaaacatcatagcatcgtcgcttcttgtctaattaagctctgatgatctggagatcgtccctgggcttgtcctacatggatataaaggcgaaaacaagtatatttgtgttactagacaccctatggtctttataatactaccaaccaacacctgtaatttaagaatggcccacatcatgatcgacattcagctgagattctacagccactgggcatcaatgcgcgtcgaagacaggttcacattggtcggaataaggaaaagcaatcataacattcgatctgcagccaggggatgaaaatacggagagctggtatctcattagtcccttgaatttaggaaaatataggcgatgtgcctcccaagccatctacttttggtccatgtatatatttcgcatgaacctcttcgctcagtcctaattttttcatctcctgctttgttttcttgataaatcaatccagaatagcgataaaccaggccttgaaaaatgcatcctttaccggtccctaagaaacatgtttcatggcaaacatggggatatcactggcgctcgtccgatacgtttattctcagcagcatgtccatggcactgttcacaggttcgtgccttgaacgattacatcgaagacgttggatcgtatcttatgactgaaattgcttctttagatgagatgctcttcgccttcatggtcccattactcccttacatcttcgagaaccgcttagagctagacacgtccctcacccagcgattgacctccctatttctagttgaaggagcgttgatatctatcatctcgagtccgtttgtcgggaatatagccgaccgggccagctccaagaaggtcctactactggtgttgctggtactgacgctgatcagcgtattatgtctatcgatcaccacatcatgtaagttttttgttagaatcgcactatcaccctattgctaaatgagcccagtgacctggcttttgatcggtcgcttcttccaatgcattgtcagcaacgcattattcatcgtcggcatggccacaatgaccgagaacatcggatcagaacatatgggcaagatagcaggcttgagcacgaccatagtagcagccggtacatgttccggtcccgtcattgccgggtttctcttcggaatcggaggatactggacagcgtgggcgggcgcggctctgttcctcgtcgtggatatcattatgcgtctgctcatgattgaaaaaccacagaaacgccgcgagaccgcttgtcaagatcgaaatagcagcgaatccctatgcgccgaggagcagacaccctcgtcggaaacagaaccgcttctcgatgcgggtcagtcgtcgagtacagaggaaattggcggttggagcttctacgtctgtcttttccgtcagcgtcgctttacggcgggggttacttgctattttgtctttgcgttgtttatcgcctgctttgagtcgacgattgccatgcatgtccggtatgcttttggctggggcgttttcccggtcgggcttttgttcgcgtctatacaaggaccggggatggtcttggctcctcttgttgggtacttgaaagaccgtgtgggatcgagggtgcctactactattgggtttctctctgttgcgcctttcctgtggtttcttggagtcgctggtgatgagcgctttccgtgggctacgttgggaacaaggggtaagattatttatgccgtctgtacgactatgattgggtgctttatgtgcttgcttatgggtgttgggacgatggaagctactggtaagttggggtgtcatttctagagactggaatgctgatttgttctttgcagcaaccgtcgatgagttggaggatttacatcctggcgtattcggtccctacggagggtactctcgtgctatttcaatcacgaacatgagttggatgtccggtctactagtcggacccatcttggctgggtttatggtcgaaagatttgggtattttgagctgcagtgtgtacttggtaagtgatgtgtgtcggcggcttgcttcccattctaacaatatatagtggttatttccttgctggctagcgccaacgctgccttttacctccgtccaaccagtccccggaaaggagagtgtaatactagtgaatttgggaccgacgaagaactctaattgctagacgtctaagagaatagaatttatggcaataatgttgattcggcttgtcagcttgtgtgggggacgcggtcaatgtgtgtaagaacacagctgtcaaaaatatgcatcagagacaacttgtaataattgaacacgacattatcatcgttggcatctgcaccttgccaatcccttacctgctttgccaatgtgcttgcgcgtatgtaggttgagagtttcggtcacatctgcatgtgtccgtttccgaatgtggcttggctgaagctgactgtatttggctttatcctttgtacggagttaatctgcgtggtaatttagtttaagtgtaatattcaattagcatcttctaatgcaatcttgttaggaggttacacgcagagatgttagatgcatggtgcaatgtgaggttagtattttattaaacggtcgaagaagctgaatattaactactactagagactatttatgaggtctgacagatattttgaatattatattctattgttacctattgagaaacactgctttcacatttctaaccactgtataagaagccattccatatcagccagggtgattgttggctggcgcaatggttcgagacctctagtacctactagggaaaccccacaattccaagagatccccccttaagctccttgaacattcctaggatcggccttccgaaaaattgacaaggtgtgatctcgaggttgtgggcgacctccacgttaggatgatcttccatcttactttggtgatcacctacatcactaacccaacaataaagcaataatcccgagggtatcaaaggcctagatgcctcgggtaacagagtacggagtatatatcaggggttacacctggtcaatgctccggggtgtcttaaccctacggagaggtcaggtgcaacctcggtgatcgtggcgatcaagggagaagaatggtagcagggtatgcagctaccagctctattaattctggctatttgcactgaacttgatggtaaatacattgcatgatgcaggacttagataactatctgcttctcaataagtagctctttaaatctgggcaagattgccttcatatcgtacatgttctcaaacttccctcatagacggtggatgctaaatgtctaattattcttatccctctggttacaatatcaataagagaaaaactatctttaggaagggcctatgagattcacataatttccatccgatatatagaaaccgcttcggacaatggctcagatatccggcatatgtatatcgacatattttcaaagttatagaggctcggatcttgatagttgtccactcagaatgtacccatgaaatgtgctgcgcatataatactatcttatatacctaggcatttgcggtaaatcctaaagaaccatttggctggtagaaacacatatactagtataacgtaccagggtccttaggatacatgaaacatatattaatgctataacaattattgaagctattgaaagttgcgacctgtgcaagatatctaaaattagaagtgtgagtgtgtactccgtagagattaacccaaccaagtgcaacattgatattcccacgtttaaaaaaatgttaacaaacagaaacataggaaatgtacggagtagaaaaacaaaaatagattcaaggtggatgtgatacgtcgatcatgaaacaacataataactgacaggtggtggggattgattagtggcctgattattgacaaggcaactgcaccccctgcggaatcaaaaccccctatttcttttaacctcaacacaccctcaatttcaatcctatcaatcatgccggacaccgctgatcagaatgcgcccgttgcgcctgttgcgcccgttgcgaccgctgtgcctgaagaagccgtcaataagcccgtggaaactcccgcgactgctgccgaaaacaccgaacagactgcagccaaagatgtaactgccagtgctccagtcaaggaggaattcgctgcaaatgatgcgactgtcgctgccactggcactgcagagcccgaagccgcaaagcctgaagaacccaaggttgagcaaccagcctacctgagcaagaacccggccttgggtgaattgttcaatcgcctgccaaccatcctcgaaagcaccggccacactgagatgtggggagtagaactcaaggatagcaatgatgtccccaccgtcaacgtgttgatcaagttcctgcgcgcaaacgaaggcaatgccaaagctgctgagacccagctcagcaaggcactcaagtggcgcaaggaggtgaacccgctggcattagcggagtccgcgaaatacagcgcgaccaagttcggcggtttgggatacctgactacctacgaggagaacggacggcccttggtgtttacttggaatatctacggcgctgtgaaggatatcagtgcgacattctcggataccgatgagtaagaacccatcatggaacgccatttacaattgcaatcaatgctaactgcgtatagattcgtccaatggcgtgccgctctcatggaacttgctgtgcaggacctgaagatgaaggatgccactgaggtcatcgagtacgacggcgaggatccctaccagatgatccaagtgcacgattacttaaatgtcaagttcttccgtatggatccatctgtccgtgccgcaacgaagaaggtcattgaagtgttcgctacggcatacccagagctcctgagtgagaagttcttcgtcaatgtgcctgctatcatgggctggatgttcactgccatgaagtttatcctgagccgcaatactacgcgcaagttccacccgatcacaaacggcgccaacctggctcgggaattccctgcttcaattgccgaacagatccccaaagtctatggtggcaagggtccggagctgaaggagaatgctaggttcatcccactgatcgaggacaaggaagaggagacaaagtgcaagggcaagtctgccgagaagtctgccgaggagcctactgttgctgagcccaccaaggaggagactgctaaggagcctgccacagcagatgttcccaaggccgagtctctgaaggaagaagctgtgaaggatggagcccagtagttcaaattggctggtgctgtctgttatgatacccggaggagcagtgaataacactccccgctcttgtgtacctggtttcgggtcatttgtgtgctctctcaagatgcactgtattgttaataccttatggctagccatacctaatactattattatctctttatcacaatgaagattgattgatgtcttcatgaagcgaaagcagcctaatgtaggcttggctgtacggtagcttatacggctgactttagaaccactcgcgcaactcttatcgacaagctttcatcttccttcattcactgtattacttctgtccattgaaatccgctgcgtcttatccaccatttagatacaatactgactcaatagcaaggcctgttattgtctagtctgtggatccgctggcggtggcctcagaatgcgactcgcttcctaaacctcatctgccccctcccttcacctcacttttcgcgatagcaccattattatctaaacccgaatttatctcgatcttttcctcacacacattcattccagaccacggccttccatcatgtctgtctggaaccctgataacatccgcgatgtcgccgaatccgtcggtatcctcaacctcaataacgatgtgaccgagaatctcgcccgggacgtcgaatatcgagttgcgcaggtcttggaggaagcactgaagtgtatgcgccactgtaagcgaacggttcttaccactcaagacattgcgctggcattgcgcaacctggacgtggagccattgtacggctacgactccacccgtccgttgaagttcggcgaagcctctctaggacctggccaaccgctgttctacgttgaggatgaggaggttgactttgagaagttgatcaatgcgcccctgccaaaggttccccgcgaagtctccttcactggtgagtgaatactcttccctacttatgtgctgtacagcctctaacgtctactctagcccactggttagctgttgaaggtgtgcagccgtcgatcccccagaacccgaccgctgccgattctcgtaacctcgaattgatctcgaagggtccgaacgccaactccacactggcggcaatcagtggcacaggcgatgtggctgtcaagccactggtcaagcatgtgctttcaagggaactccagctctactttgaaaaggtctgcagtgctttcttgaacgaaacaagcgaagattatcgcacctccgggtattccagccttcgcgaggacccaggtctgcaccagctggtgccatactttgtccaattcattgccgagaaggttacgcatagtctcaagaatgttttcgttctcactcaggtgatgcacatggccgaggcgctggttcagaacaagtcactttacgtagacccttacgtgagcaaacctactatcagagaagaacatgatcagacgctaaccgcatcagatcgcatccctcgtaccatccattcttacctgcctcatcggtcgacagctcggcggacctgcggatctcgcagagtcattcgctctgcgcgatatggccgcctctctcctcagcctaatcgccaaaaagtactcccactcatctcacatgctcaagcctcgactcgtgcgctcctgtctcaagaccttcctcgacccttcaaagccattcggtgctcactatggtgctgtcatcggactgcaatctgtcggcggctctgaagtaatccgagtgctcgtcattcccaatttgcacgaatatactaaactcctcggcgatggattggacgatgctgctcgtcggccagctgccgagcgagttctgagtgcacttgtggctgtgttgggctcgctgcgtagtagtcaaccgtttttgaccaatggtcatactgtcacagacgacctccgctccagactagttgacaaagtcggtgatatcattgcatcaagaatcgtggaggctggtgaggtgcagctagcacatatcattttggaatcatgaactttcgcatggtatctctcgggtgcttttgcgatgagatcccgatgattgttcgtacgacatggcgttatttcgggcgttggttcagggattatggatacctagtagacatattcaggatgtggatgtgtttcattcttaaataatcacgttgacacacacattgatcagtgtgttttatatggtaactccatccatggatatcctagtgcattcccctatttgatatctatctcgacttttcttccctcgggaaacgaagggctttgctttttgcacatgtgcttactctcatgggtcataattttgtggcgcttgtctgttgtcattcacattggtagtggcttgcgtagaattcatattggtagtggcttgcgtagaatacgcatacatagacgcttgggccccccgttatatgctgagtcatgcatagcttatgtaatgtcttcagggacaaagtttatttctgcctagtctcaccgctcctgtgagaaccagggcctcgctttggcgttttctttcgtctctcacaggttgaaatcatccgtggcagtctgcacattactgcagctctaacttgcccaatttgtgtgtaacatattacagaccccaatactccgtatattccctgcaattgaaactaacacaattgtttccctgatgtcagacaaattttgatccgatttgccccacactgccgcgggcccacaaagaaaatcactcattaccaaccgagctgaccttcagcaaacattttgcacttcccctcccactcgaggtcaccaaggccacaacaaaaactgctttgccaatattttttttcttagcgagagattccttgttctctctagcccacaagtaatcaatccttgatctcgggcacccatcgggcttttgggtgagactgtcctacagacaaacccccgccgatgttcacgactgtggccctccgctacctcgtgctgatttaagtcggacttgtcttcgccttccatgagcccaactgatcttctgcgattcttgtctaagcccgcgaagtaagtgtgatttttccctctgtgtttggaaaagccaaaacaatcaaagccattgaatcgagacatcacggccaatgtctatcttttattatagcactgtttctaaccagcatcctgctctaggcctcgataacgcgactcccgtcgtcaccaacgcctacattttcgaatacccttttttcaaagcagaattctcgtctgctagacccgatactttgaccggtatcggtatctttcaggacgagggtaccgactgctagtcaccatttctcttagcatcttcttcttgtccttcgccttccgccctccttagcagccctttggtctgtttggagattatacccgcctggtctgaccagttaaatctttgtttcagggccttctcttctcagacgggcatcgcccccttggccgtctgggtaagtagacagtgcttctatagcctatcttctcgaagtacatagggcggtccgacgtcactgtttctgcttcgttcaacccaaacaagtacaacagctcaagctacatccgtcatcatggtttacgtcggtattccaacgaactacaccacctcgccgtcctcgttcgtcgcggggaccccgtctctgacaatcaactatgaggccacccaggatctcgactcgaccaatgccttcgaaggtcctgagaagcttctcgaggtatggtttgcgccatctgccgctgaactaggcgccgccggccccgagggcctcaagaaagtgcccggggaaatctggaaggacatgttggacctggtcaactgccaagtgctttccgttatctcctccgatgagatggacgcctaccttctgtcggagtccagcatgtttgtctggccgcacaagttgattctcaagacgtgcggaactaccaccttgctttcgggactcccccgcatcttggagatcgctgctctgtttgcaggcttcccacgcgctacggcgcctccatcccggggtatcacggtggctgcggctccctaccgagtcttctacagccggaagaacttcctcttccccgaccgtcaacgtggcccccaccgcagctggcgcgatgaggtgcgctctatggacaagttattcgtcaacggcagcgcctacatgatcgggaagatgaatggagaacattggtatctctaccttaccgagcctggcaccgtactcaccccaccggcgagtcctaaggaggaggttgacttccgcgagaccgaaaccaaggttctcagcttccctgaagccaaactgcgcactgattgtgatgagcacgatgagactctcgaggttctgatgaccgaccttgaccaggaaaatgcgaagcagttctatctcgaaaacgccactgctgtggccgagaagcgtcaccgcaactcggagaaagacgatgatcatctggatgtcttcagcaacacctccgacatggatgaggagactggtggcatcttgccacccgagctcaccactgagggccacgctctgggcactatcgtctctgaggcatgcggcctgtccgacgtgtactccaagagcaagttcccggatgctcgcatcgatgcgtacctcttcactccatgtggcttctcggccaatggcgttgtgccggctcctgatggcaacgccccgatccactacttcactgtgcatgtcacaccggagcctcagtgttcgtacgcgtctttcgagaccaacgttccgcactctcagaatggcaaggccaccgccgacatcatccagcaggttgttgcgatcttcaagcctggccgtttcagcatcaccttgttcgagactaagcccgcgttggatgagctcgacgaggcgaatgggcagcatgatgtggcgcacgctcagcgccaggctcatcgacgcagcaacaagatggagcatgtcgaaggctaccgtcgtgtcgatcgcatcgtccatgacctgaacggttatgatcttgtgttccgttactacgaacgcaatgactggaaagggggggcaccgcgacttggagagaagggattctgagctgacctggttcttcagccatccgttattggactatctccttctcgcgggtgcgacctttctatccgtttgggtttctgcctacttggcattcaattttgcacagttctttctgttttgtttatttctatttttcgtgtcatctcgtttatttccttccatagtgcacagcatcgcatgattaagctgagcgactcattcttttgtcatttgttacagtggttcagtcgagaaatcttgaaacataggtatatcgagcttctcagaatttcggtttgtcattcctttgatcatacatcatacctggtttcgaagactcattttagagtccattcaagcgtcttgagctgcaatactatcattttctgcaacatattctttccagtgtagagtgtaaattcgaattctaagattgcgtacggagtacagcattcaatgtagtgtcatagtccacctcggacggaaggcggtgagatgcgtccttatcttgtcttttgtccaaattacttccaatcgatcaacgagctacattcgaaaccctgcaaataatatcgctatctacggtcctttgagagatacattactttcagtccaactagcattcattctttgttccaacccgaggttgatatcgaccttcctcccccggcgcaacggcgcagcgcgaaatcctcggccctcgaaagagctacacctggcgctcatattctaccgagaagattgggcattctcgtagccgactattttgaacacaagcttaccgagccatcatacgcgcaacacatcgcgcgcccatttacccactacaacctctcaaaatgtcgtcaccaccaccataccaatcgtcatccaatcccctcaaacgaccctccatctcctctgcctcacagccgattggcaagaaacagcgcatgcatccactccgccaaacttcattcccgaacggcatcgatgttggagatcgcagtttcgctggtaccagcgaagccggtagcgtgacaggcagtttcacagggagtctaggcggagcaagcgcagatggaatcttctctgccgcacggggaaagaaacgcggacgcaagagtaaagccgagaaagagcgggaacgggagcgcgatgatgctctcagcgctagggcgggagattctacacggttcggatcagtcgataacgagggttcggtccgaggtggtccttctggcggcggaggcggcggtggaggtgctgatgatgcggacgattatgatgacgacgacgaggcagagctgtttgggcagcaagaaggagctacggatacagaggctgagaagaagaacctagcgtacgttttctcctgtcttcgtggtaacattggatgaagctaattctcgctcttggacaggatcctggttgatgctttcaaccctatgcaatcggagcgatacgatctcttcaagcgagcgaagctgcgcaaggaaacactccgccgtatcgttaaccatgccctctcacaatccgtcccggccagcgtggtcacgaccgtcaacggcttcaccaaggtcttcgccggtgaggtgattgaaatggcgcgaacggttcaggcccaatgggccgaagcacacgaccttgctgcgcgcgatgcgttcgaggccgaagaagccgctgccgaagccgcggcccaggcgaaagcctcagctgcgaacgcaaattcaaaacactccacaccaacccccacaggcactccaacctctttcggcaatggtgttaaaaaagaaccacatgactctagtcgtacacctacaccctctatccctacttatcagaactctccgcaccaaactcccactcctctccgccccagacgcgagttccgtcttccgccaaacccacaccgtggccaacttcttccatcgcatttgcgtgaagcggtacggcgaacgaagcgtgatggtgaaggtggtggagtcggctactcgggattgagtctggagaacctgggagttcgaggctcattcacgtggaactcggggagtgcaggtgggaggaggcttttcagatgagaactcagtgctcgttgcatatttggtgagattttttactttcttttcatgtctaatactacactaaaattagcgatctggactttgggggaaaattgatacggcagactggctctgatatcacgattcttctcttccgcaacatactatgtatgcatgtactatgaacagacttgaatccagtcttaatttagaacacaagcgtatcaatcgcacattccattagatttgatcgatcgaacccagacgccctcgatcttggcaggggcgaagaatgccggtgtcatttacaacacatctaagtactccgtgcaggcagacatgattcgtattggacaggagctattgtctagggttaattatttgctccattctcttcatgtggtctctcacggtataccctatgtgtcgaattctactgttttcaaacagtcaagtctactcctagtgtaaccgacataccaaacacagccatgttctggatactacatatcacagaagggtggtgcttttctcaacttcatcctgctgcctatgtggctaggtggtctggttgggtacatggcgttctcggaattagggctattctcaatgtcatacagtagacggagcacggagcagagatggactaaatggaaatacatagtagacctatcctttatccccatccaaaatcaagaatgaggtagatcatttattcgaccctgcagaaagccaccgcgcatgtgcagcccttgctgctatccgagtggcgttctcctctccgttcctgcaataatgtgggactacatagtccgatgtccacctgtctcccacggaatatgcgattggatctgagcacatcagggctggcgcttgcagggccgcgtcgactgcaactcctttcttccttggcagcctctttcttgatgggatcgccgagggaggggattgctacgtatcccagtttcttacatgtctctgctttctttgtgttccttttactgtcattctattctttttataccctcttttttcggttggagtgggatagtcgtccttcttatctcatagcctgattcttattcggatattggacgtctttgacttgcgtttataatgcactccctccagccctccaatctatacacccgtttaatagatacaatacctacagccttgccttggtcctccggggatccatcggtgaaaggagatcccaggaagagtgttaaatgggttgacgtatgtcttgaaagcagataatatacgatatttctaacatgtttaacttctagggcctgagaggaatcgcctcattcctagtagtgctaacgcacctcgcccgcgcttgggactatgatctattctcaccacgcgacaacgaggacgccagtccgcgaatcctccaatggcccatcctccgaatcccctggcaaggccgtctaggcgtaacgatcttcgccttcctaaccggctacgtctgcgcgttgaaaccgctcaagctgtcgcgaacaggtgatacattaggcgcattcgagacaatagcaaaaagcgcctttcgtcgaccgccacgactcatctttcccgcgacgattgccctggtcatctcgtggactgttgcgcaattcggcgggtttatagtcgccaatagatccgattgctggtggtgtcggtatgccgcgccggatctggaggattcgttttggaaggagcttgttcggttgccgatgaatttcttatcgacttggacgaccggatatatggcgtacgatgatcatcagtgggcgcttctgccgctgctggtgtcgtccatgttggtttatctagtgctttcggcgactatgtttgtcaagtttcggtatagggtcttgatctatgttgggttattattgtatttccatcaggatgcagccaaggatataggtgagtgttgctcgtggaaacaacatatgagccttcaatttagtgctcgtggcagacaaaatgacccatcgctaatgccgagtacagaaaccttccaaatgcaagccatctacggcatgctcctcagcgacttctcctaccacgcacccctcaaagattggatagaagaccacccacgaggccggaagatgctcaccatcccgctcactatcatcgcattattcctcgcttcatacccaggcgaacaccccgaatgggccggctggtccaacgcaatgctcgaagcaagtcaatacatcttcccgccagacgtcaatgtcgggaaacgctacacggccctcgcaattgacatgatcatcctcgcgatcttcttttcgccttcgacgaaagacttcctctccagcagactcctactctggctcggcaagcagagtttcgccgtctacctcatccacggaaccatgttgcgtgtcgtgctctgctggatgctgtatggtatcagcgggcagccgtgggagggtcctgaggcgttgaccgatgacgtccgcgacgactggttgcctatccggccgccgtgggtcgttgcaattagtattccggtctggattgggatggtctatttccttgctgcgctgtggacggcgtatgtggatactttctgtgcttctctaacgcagaagctggagagggctgcttttgttgaggacgagaagacgccgttgccgttgcaatcggtccctatgcagacggcttgatatagatttaagttgactcacctgggcttttggtgttttgtggctgctttccttcgacatggctggaccatggccatgggtgtaaatatgacttgttctggcttttccctttgctcttcgcgtctttatccaatgcaatagcaaaatcagtaatgaaagcttcaattatagaagtgtacatagccaaatggagattgtggtcaagtaaattccactcttcaaatcacgaaaacaaaatgcgaatgctactgcgccatattttacagtttgtctaaacacacgccgatcaagcacggcgagagccacgccgcccgttgggtttgcgagctgccgtctggctattcttcaaggacttgcttgccttggcccgttcgttctctagggtttgcatgtgctccttgcggcggagttcgttacgctccttccgcatgagctcatcctcgtcttttcgctgttgttcgtattcatcagcgcgcttcttcttgtccttggcgagacgttgctccaccgttgaagtgccaatgctttctgagacagactttgagaagttggtgccgactttgccgaatttgttgtagatgcggtcaatcaagctgattttcccaccttgttccggggaggcagctagttcgctgcgtgctttctcttgtgctttctcttgcgcggctttttccttctcaagccgttccagcagcctgcgaaggggcttgctttcggtgttttgggtaactgccgagtacttcggtccattggatggtctccgggcgatcgacaggtgcatccacttccggaaggcctccgagttgatcaaataagtttgacctaggccgaaaataccacttgccacaaagtagagctgcagggcactcggcatgaacgccatgaaggcaaaagacatgacagggaaaccatacacgatgtactttcctgcttcagtttgcatcatgggcatagcgccggattcaccacctctctgttatcttggttagtatcgcagttatagtagaccatatgagaccaacttaccctcagagacagacacagcgtgcctgcagccatcataggcaagatgtacgtaggatcagcaacagtcagatccttaagccatcccacttgttccgcggctagggccggcactggcaacgtagtcattgctcgcacgactcggaaacatccgaaaccaagtggaatttgcaacatgggaataaatgacttccatgtgacaatgccgtgcttctggttgatctcgttgatctgggccctcaaaatctgggcttcctgctggttcccatcggtcgtggcagtaaacatccttttccggaggggctcagtctccggtttggcgttggtcattcttgtagaattctcggaggcgccaatgacagccttcagcattgccacacgagtcaaaataccgacggccacgatactagcccaccatggcaagccggtccatatgtgagtgtgctcgataagccattgcattgtcgtcgtgaagccccagccgaagtccagcccaagctccttgagatatccaatggtctccgggatcgcggtaatctcagtcatgtctaccgtatttttcaatgagccgtctatagcatattcagggagtacgtcggggtgggtagaggaggtggaattgaatcggattgcggccgggccgacaacagctggtgtcatgcgccagggagcactgccggatagtgctgatttcaattggctccgctggctagggaaccgcaggctttgtgaccgcaaggtagacatctgcaaagccaagtcaatttcgatgtttttgcaaatccgagtcaacgggagaacagacagatctagaggagcgggacatggcggtcattctctgacgggcaagggcagcggctgcgccggaccctttcaggccaacagatcccatcatggtggtttggataattagaaatggggagatagccagtacggaagagttgttctcgtgccgttcggcgcgactttttctgcccgggcggtaaatgctgacccacggctatgttgtacaggacaggcacagagactcggagattcgaatatggaaatatagataaatagatggaattcatagacttagatattctatatggtaacaacatctggttgcaaatgtaaatcctaattcgccaaacgcccccctgagccaaaaggtctatgtacaaccactaaattcaggtgtgcacagaaagccaggtatcgatcccaaatcacatatgcttcgattttgtcctccgcgtaaatgcagtcattgttgaacggatcaaacggcagaaacatcaatcacttattccaaagaagcagtgtccctcagtccagggcgtctccgctccgaaggaagctcccgcatttcaacaccggggcccactgcatgtgagcggcgatggttggggaagatctataataatgggagcagctaatcagtcatagaatccaaattgacttatgtaaaactactcataccttagtgttagaccatccaaggcggaaagcagcctcgtgtgcgaacagctctccaaagcctagcatgagaccattgacgaaggggaggaagaggttgatgaccgctccgcgaaggagaccccacacacttggcggcttataaagcatcatgagtgagcttgtggttgatgggaccgaggaggacaattcatggttcgcggagtagttctctgagtcggaggggacggtgatggcagagtcgtagagctcggcgggcgaggcggaggtggggtcggaggccattattaggatcggaaaagaccgaggatttgtgttgtgtctttaaataacggcgtctgagttggtgttgacccttgatctcgagaaaaaggtaaagtaaaatgatgcgatggtcccgatgagctcgttggggtatcatgtgggttatgtcagcaggttttgtgccgcgggcgcctatcccgttgaataaacaatggccttcctaactaggagaggcgattacaaccctctgctttcaatcttcgaatgtttctctttatccatcactaattttatagagctcatgtttaatgtaaagaaaaaaaaactagcagcacccaagatagtcacgcttgttatattcattgacgggaagtcacttgcaacatgaagaacttgacactaatggaggaatgattcgagcaaatagatatgtaaaatacaactatcagccaagcccatcgattccatctatcaatgcaagatgattcctgcttaccaccaccgtctacatctcgagtgttctctaatgtatcaaactattcatcccactagatcaaaacgactccaatcggctcataattatgtgctcaaaacaaattttatattaaaaaataaaaactatctatatgttaagtttcaaaaccaagtatatatgcaatggatatcaaaagacgccgccaatgtcatccatgttcttttccacatcagtcataccagtaaaccatttccacaatgctccacaagctgaaagaaatgaaaaaaattacctcctttttaaaaattcccgggaccaattcccgagatcaagtttggcaacccctatgccttgacagccttctcctcgtcctcatggtaagcgaacctcgacagacgacgaatggcctctcccttgaagtagaagacatagggaatggcgcagcaagccaggccgatgaatgcaagaagcgaactggcccattcgtcgcccagacgctcgtacatttgctctgtgaagagcacggtggaggcaccccagatggaacggatgaaggtcttggctgcgagagcggatgcggcttggtgctggtaggtgtcaactggagagatagttagcaatgactcaaatcaaaaagattgaatgcttttgatacataccaaggtagttgttggcggagttgtacagcaggataataccgaatccaataaggaagcctcccatagccggtcccatccagtgaatgtgggggtaggaggtccaggcgaagacgaaaagaccagaaggcacacaccagcaagcacacatcatgggaatcagacgtttttcggcgggaggcttaccaccgcatgccgcagacattttgaggtagtgcttgttgacaaaaggagcgcaagctgcgctcatgaccacaccgatggccagaggaatgaacatgagaccggtattagacgcgctccatcctttgccgccctggtaaacaatggggtagctagaaatatagttagtttccagtctcttttaagtgtataaagacaaaaggttgttcacttacgcaacgaagaacatgtatagcaagccataaatgacagacatgtagagagaaatgaacaagacgatgggttcaaggaacagaagctggaaggggcgaagaatgaagacgcgcaactcctcagccaatggacgagcatcaagctcggtttcggtggtatatttagggtcgtcctcggtcttgcggagtttcgctgcacgtctctttagaataattggtgcgaatgtctcaggaacggtgaaactgatcatgacccaggcaacgaaggccaggataagctgaagccagtaaagccagcgccagccagcattgtcggccaaaaatccaccagcaagtggaccgatggccggaccaaggaagggagcagcgctgaaagcagccatgggaacaccacgctcctcgctcctccacaaatcggccaaagttccaccgacaagggtcatgggggcactgaaagcgattccgtcgatcaaacggcagacaatgagagttccaatgttcttagaaacagcacatggaatgacgaaaataactgcgagtgccagggtcagagcgtagacgggtcgacgtccgaagatctctgacatcggagcaaagaccatgggtcctaaaataaggttagaactatgcaacccatatcacacatctgtattactcaccaacaccaaatccaataacgaaaaccgtgacaataagcaagctaacttcacggctgacatggaaggactccatgggtccctcaatatcggctgtaatgacactactgcaaaaggcgacgacgaagcaggtgaatgcgacaaccatcgtgcaataccacttgtaagccttggaccagttcttgggattatcaggatcgtcgatggtgaaggtcaccatcttccaatcctcgaatttaccagtcacattggacttgatcggcctgatgatttcacccgtctgcgtctcagtgatgtattcgcgtaaatccgcatcatcggtgacctcgcggacaggtagatcgaggtaatcatcgggtacggctgcattgttgttctgagccccgagggagaccgtccggatagcctctactggggtcccatctgtgtgggtctcagccgagcgtggagcctccatgttgaaggatatgactgatgatggagggctgtacccagacaaagtatgaagtgctgtgtagttatgggtgcagggtggtataggcgcaaggggggtataggtgcaaggcgttgtattaggtgcaaggtattgcgatggctcgagatgttgtaatggtggcaagctatggtcatacaatccgggggggcattcttttataattcaactccaataaaattcggcgccgaaatttcgagaagtgggtcatgatagaaaggaaaaagcaacaaagaatgatccatggacgaactgttcataacattccatcgccgtttttcctacaagaagctctgatatcggcccgcaaccaggtgggttgcctaatagggaatggcggaactagcctaatcaggcaatatgcgacgacagacgccttggcattacagcttgattcatgatacctcattttcctttgggaaaaagacacttgctatacttttctattaccaatgtgaagctctagacttatcagcgtgcagctctactcattggcatgtcggtaagcccaccctggcgggcctttccaaggagactacgactgttacacttcggagtagagaatgcgctttccatgtcgatcaatgtgattgttgagcaacaacagctgaatgcgttgtagcctgggatatttcttttgctgctgtatacttcctatcttcttcaagggatgtctttccgagttccagcttggcatcagcttggcatcacgcgaaagcgggtcgggctgtgaccaccacgcgtcgtgagatcaatcaaggcgatcgtaatatagaggccgaattaggagagcgagaattatgaaacatagtcatcctttagatcaaacaaaccttaaaaacggattcgaacacgtagatatccaatactccgtagttgtatctactttgttctggaagagacgacctgaaacagcattgaacttattttgatcattagcttggcctaggcatattatgcacattgtcacatggatttgtatacatacaacttttccgcccagtgggccacggtaggttaatatgactgtgtttttgtgccccacctgtatagttcggaacatatcgcccaatttggaagactactttatttccacattgggaatatcaaacctctgcaaggcgggatgtcgattcgccacggcatttttagatgttctagattccttacatcaaacctaggctttgttcgctggccaatgagagcacttgccagcggttatgggtcccgtctagcatctatgaagctaggtatcttttgtatgggtggaccatataaaagatacaagtctcccagtccttaccccagaattagtgcaatatgtgtttttccggttgtttgtgtggaaatttttctccgtattattgttggagggcatactccgtactccgtaccccatacccataccccttggtggaaattctacccctatccccataataaatgtttgtttttatttcttcgactcatgtatacgcaggaagtacactatggattaccaatgtcagataaggattccgctagtatacgagatccctcgtttcaggcagacccagaccctaattgtggcgtcaaaatatcacagatctcatcatgatgcaaccctggaagtgtcgcaaatgtcacgacgccgaattggggtgaactcgaactttaatttggtggtcacaccggtatcgtgcgtataagccccacttttcatatatccaaaagtccaaattccaaaaatccacgtctttccaaatccgctaactcgggcccgtaccggaaaattccccttacgatcatgtcggcctcgatgcggaagatgccgagttttatgcaagttgaggagcctgcggagttaggcaccggcggtgacagcgcctgtttgcgaggtttgtttactagctagtagttagatcgtgtttctcctgcttctctctctgctcactttgttgcctatggaatgctactccgtatgttgtactcgtatgcagtcttatatctctcatagagatcatccctgcggtagtcatccctagaataggctaagctttgtgccacctctaggcggatcctgaggatcaaaggggggctctcacgcaggggcttttgatggggccactacggagtacacatagagcccctttatgcatgggccggatacataacttggaatttagagaaccaaaattttaactataaggcgctttgacaatatggataacagggtccagggttaagcaaaggacgggaatttctcaattagcttccagtctactttgtaattgagagaccagcaactagcgtttgtattgtaatcaatataacggaaactagcttacgaaaaagaaaaagaaaagaattcctcgcagcttgttggtgtggccccgaattacggagtactagtcttcagatagcagaaaccttagggtttattcagctctgtagatgcccaacttcagcagattgctacccaaatatcctcttatttgatgattggaccgatgaaggtatgttcgtttcagacaatccatcaggcatcaagtacttcgctcgatgttaccaaatggagttacttttccgagtacgcggctaacccctatgatattagcactcacttgctcacagaccaaatcatccttatcgagttcgggctgcgttcttcacgaaagtgttgctcgaattttcaccctagcttcatattcatcggcggcccactcacctctaggcgaactttatgcttatcgcagtcttgtcaagttcctactcaggtggaacaatgaggtgtggtcccaccaacttctgctccggcacggacttccagtagctcattaatgctgctggttaaagggggtatgaaaattttcagtagattgtgggcgctaagccctgtgggccaagctggaagtttacttagccgcggaggtcaaacttcgggagagtaacaagggtttaatgataagctgaaagggtggtttgaagattctatatcaaaattatagtgctttcctcgttgacgattgacgttcaaattgtactctagctctttctgtccttgctaggctttcaaggtgtttggttattgtcgtatgaaataagctcaaatactaagtagggtgtgatgagaaacatttcaattatgctgtcttcggtgtctagaatgtatcccaatagccataggttttccctttttttgaactttatagatgaaagaatttatatagcaaccgtgccaagcgcctaggaccaccatacatatctggtgttggagcgccccaccaaacgccagatctataaattagacttctcttccaccctgtagatatagaaaaccctccttcatttggaattggttcagaaagagaatcaggtaaaatcaacgataggaaagaactgatcctcgtattcagactcaaagcgactgagtacagcctatattcaaactctttcctgcaatacaacatactgcaagttgtatgcatttacgagttcaagattcttggcatgcaagaagcgcatggcgagtcatgatgtcaagatagggttagcgttgaagccacccaattccataaataccaccaataggcatcgcggcggagttcgaggatttaggagcgcgaaccgtaagaacgagggaaggatactcgttagcggccaaatcgacacgggtgccgttcggaacgaatgcccaatctgcttctttactatataggaatccgcaagttcgttctatgtcgtaagaatcagcccatagatttagggtagccgagaacgatgctacggaatttttcgatcatactttcatgttgtcaacccggtatttttcaataagatagcagacttggcgtacgcgactatgattcgaacatctagacaaagtgcaaggtctgtttcgatctgggtgaaaaggcattgcggaatttcatgagcccagatatattgccatggttggagggtatacgcacaatggtatgcctatcgaattcagctctccgattgtgtcgtcgacatcatgtaggaagtgtgggcgaagttttcctgcgttggggggcacgacaagatcgttcgactccataagagacggagatgattgggatgagggcgtagttgcagtggtctttgagcctcccgaagcagaggtaaattcggcctaaggttaatcgaatcgaggtatgccaggtcatgtctcttgtgacatgccaggtcgatcgaagaaagagttaaaaatcaattcagaatatttatgatgaagatggaaagaagaagcaagtgtagtagatggagcctaagtatcctttatatggtaaattcatacaaaagatacctaacttctagtttggtgtttagtggggcgcgacaacaccagacatgcaccagacatggggtggttggcatttgatagggtcaattgtaatattttatgaattgacatgtcccttcagaagatatatgaataaatacaccattgtatactatgcaagaaaatgaacgaattgaagaatttgttggtgtcaaactttaaaccgttatcgtcacatgacctagtacgataagccacaacgggtttagggcgggggaaactcatttctcttacaaaaaaagaaaagcggcgatagagtcatcgccggcctcttctagcgatcttctcaagtccacttgagagaggcactcgagccactcaatctacttcggtatcaggagaatcaattcatatctcctgtgtcatacttgattgactcattgggagaatccccaatttgcttcacgatgacttctaccgatacttatctcgccatcccgggctctgtcgccttttcccgctctcgggggcatgctattgctgatagcatcggtgtccaggacgtccgagcccagtggattcactatgtgcatactacccagcccttggaagagcctcagcgtgccgtactcgagcaattgcttcagtacggcgatatcacagacatccctcctactttcgaaaccaccgacggtcagtccgataccttctatgttttcccacgcaccggtaccgtctcgccatggagctcccaggcaacaggcatttcgcacgtctgtggcctgcagaagtacgtcaagcggatcgaacggggtatgaagatttcgtgtcttcgtaccagtgcggaggactacaagccgaagtacatggatacgcttcatgaccggatgactcagatcattggcaaggatgagcccgatctgagccttatgttctccgagcacgctcctcaacctctcaagactatctccctccagggtggtaccaagtcccccaaggagattctccaagaggcaaatacggagctcggcttggccctcgatgattcggaaatcgaatacctggccgaggcctatggtccaaatggtgcgattgcccgtgaccctactgatgtcgagctcttcatgttcgctcaggtcaactcggaacattgccgacacaagcagttcaatgcttcctgggtgattgatggcaagcccatgccaaacagtctgtttgccatgatccgcaacacacacaagaagcaccccgaacacaccgtcagtgcctacagtgacaatgctgccgtgctagagggccccgaggccgcgttctgggcccccgatccaacgaccgggcagtggatgcataccaaggaagttgtacacttccttgccaaggttgaaacccacaaccaccccactgctgtttcaccctaccctggtgcggctacgggatctggcggagagatccgtgatgagggtgccgtcggtcgtggctcacgccctaaggccggtctttccggatactgtgtgtcggaccttttgattcctggcttcaggcagccatgggagctcgatgtcggaaaaccaaaccacattgccagcagtctggatatcatgttggaggcacccattggcagcgctgctttcaacaacgagttcggccgtccttgcattggtggatacttccgcactctgctcaccgaaattgatgtgggcaatggtgaaaaggaagtgcgaggataccacaagcccatcatgatcgctggtggtgttggaagtgttcgcccacagcacgctatcaagcacccagatgttgtcaagccgggttctttccttgttgttcttggtggtccggccatgcttattggtctgggaggaggtgctgcctccagtatcgcttctggtgagggatctgctgagcttgacttcgccagtgtccagagaggcaatgccgaagttcaacggagagctcaagaggttatcaacgcctgtgtggccatgggagaaaacaaccccatcaagttcatccacgatgttggtgccggtggcttgtccaacgcccttcctgagctgatccatgactcgggcttgggagccactttcgagcttcgtgaaattgataacaccgaccgtagcatgagccccatgcaaatttggtgctgtgaagcccaagagcgctatgtcatggccattggtgaggagagcatgaacaagttcactgctatcgctcatcgtgagcgttgtggctactccgttgtcggtcgtggcggcggttcgtccgaagaagaaaagagactcattctccttgaccgagattccaaggagtacccgacccccattgaccttcctctctctgtgcttttcggaaagactcctcgcatgacccgcactgtcgattcgcggaagctgaagctgcccgccgtggactctagcctcagcaagtatcttccctctctcacctcgaggacggagattattgatgaggctatcaagagagtgttgtctctgcctgcagtcggctccaagtccttcttgatcactatcggcgaccgcactgtcggcggcctaacagcccgtgaccagatggttggcaagtggcagacacccgtatcggatgtctcggttactgccacttccttggcccagggtatgaagaccggtgaagccttcgctatgggtgaaaagccgacgttggctcttatctccgcggcttcgtctgctcgtatggctgttgctgagtcgctcatgaacctggctgcttccgatcttgtcgttcgtctcagccaagtgaagctttctgccaactggatgtctgcgggtaaccaccctggcgagggcgctgctatctatgaagccgtggaggctgtcggtctggatctgtgccctaaacttggtatcagcattcccgtcggcaaggattctatgtccatgaagatgaagtggaaggatgagacctcgaacgaggccaaggaggtcactgcccccatgtcctgtgtcatctctgcctttgcgccggttggcgatttcaccaagacctggaccccggctcttcgcagcttcgaagaagtaggggagactgtccttatgtttgtggacctttcgttcggtcgtaaggcgcttggcggatcggctcttgctcaggtcttcaacgaagtcggttccgagtgccctgatattcgcgacgttgatctcttccgggacttcttcgatgctacacagcaacttcaagaagtcggaattgtcttggcttaccacgatcgctccgatggtggtcttctgactactcttgctgaaatgatgttcgccggtcgctgtggtgttgagatcatgctcgataacatatgtgcctctcacaataccaaggatctcattgaatgcctcttcaacgaggagcttggagccgtcttccaggtccgcaaggagcatgagatcctgttccgctcatgcttcgccacttgcggtcctcctccgggtctgatccacaagattggacgtatctctcaacagcccaagcagaaccttgcgatctactacaaggctcttctgatttaccgcaacacccgttctagcctccagcagacctgggccaatacctcctaccacatgcagaagatccgcgacaacgcggactgtgcggagcaggagtatgccaacatccttgacgacgccaaccccggtctttcttggaaccctaccttcgaccccaaggacaaggccttgcctatgatggctagtctttcccaatactcccccttcgccaacaagccccgtgttgccatccttcgtgagcagggtgttaacagtcaagctgagatggcatttgccttcaatgccgctggcttctccgccgtcgatgtccatatgaccgacatcctctccggtcgtgtgtctctctccaccttcgccggtctcgctgcctgcggtggtttctcctacggtgacgtcttgggtgccggccagggctgggccaagtccgttttgctgcacgagaacacccgcaaggagttccaggagttttttgaacgtccggatactttcgccctaggtgtctgcaacggctgtcagttcctgtctcgtattaaggatctgattcctggcgcgggttactggcccagcttcgagcgcaacaccagcgagcagtacgaaggccgtgtctgcatggtccgcatctccgaccccgacccatcctgccccagcgtctttttccacggcatggacggcacttcgctccctattgctgtcgctcacggcgagggtcgtgcctcgttcgtcaattcccagggcatctcggctgccgacttcgttcgcgagggtcttgcccccgtccgattcgtcgacaattccacactcaagcccaccatgacgtaccccttcaatcccaacggtagtcctgagggtattgccggtgtgcgcagtgccgacggtcgtgtccttgccatcatgccccaccctgagcgtaccatcatgaacggtattgccagttggttgcctccgaacgccgagtcctggggcgagattggtccttggggacgtgtcttctacagcgccagacgctgggtgggttagatttcttagttttatatttacggagcttttcttatcctttttttctttctcgttctgagttcttgtccatattctctttttgatactggagttgaacatgtcaaaatagcctctcaaataaatataaattgttcaataatatatctgaataccaatccaataaaacacaacgataatatctgaacggagtttatatagagaacctagacctaagggccacggggaattccgcatcgaacgtaaagacgccgagcctctagtgacgacgctgataaagctgatactttttttatagttacctatgttgaaagcttagatataccatcgactaacgagccttatggttcttatctaggcgacctacaaggcctcagctgaatagccggaggttacattcaagtgcccgcctctacctagctgtgaggaaagaagcctaggacttcattttgagacagatattcatgcacgtcgttgaaaaagtcattattgcatcttccactagtacttacgtcaaattttaggtcatataacgccaactccccgctggaaccaaaacaagggtatttgtatcaaagcctacgccaatttcgccgccattcgagcctgtcggcaagaatatcccaactttgcagcccatctgcacgaactaaacttttcaagccatccgtgacaaaggtcgttagatggttgaactggtaattgaccgttttcagctgctggctataggtcgagtcacgaaatgagactgtgagtgtgtgttcgtgatcgtaggcctcgttatcatcatcatcttcatcatcatcagactcgaattcttcttcgggttttttctttgtgcgcagcgccttcggattctccagatattggtcttcatcgccgagcaagtgcgcggtttgtagatctgcgaaatgaacacacagatctaagaaatggatgattgcatcgtggatatgtgataaatcttcagaaagaagacactgggcttccaaagaggacatgtaggattggtgggcagctatcatggcatcgacatcttgtgcgccagatagatctttgtgtagagattgggttgtggtggttattacgagataggtcagatggccgtagatgagatcgaggacccagagcatgttatgatgtagagcgtgtaccaatgtgtccttttcgtcaggtgcgatgatacgggcgtcgcgaatacgctgtttcacaatggcatatttagcgcgcctgatctgcatcaggaaggtcgagattcgttggtatgcctgtattgcgtcctcggtgattatgttcgcaataggccacgggaggccataatcaattgagattgcttctagaattcccacggtccgatgatcattttgagaaactcgcaatgaagtactagcaggccgcacaaggagtcttgatacgtcaatgacggatattgaactgaaagctgtccttgatatctcagtgagcaggaatctgtcgtcccaggaacgaccccgatcgatcaactcaaagatttttgcgtcaacaatgctgatggcgctcatgtctttggcaaggtagacatgttgaagagcatcaagggaggtccatagtccgcattgttggtcgagttcagttcgtaataagctagcactgagtgaatggtccacatccacgagtttttcaaaagcagactctactaatgcggggaaaggaagtaataatgaagaatcctggcaatagaagtcctcaaatttcatggcttcaatgtctggtagcgcatttagatggcggagaaataccatgctctttcctgcagtgaagactttctgcacaccggcctcgagaaactgggggatcctctgctgcctgtggcccgtatcaagcacaaaccagtcatgccaaagagtccgcagatccccattctcacgatttgttcgcacgaagaaagtgctgtccgaagcatcgacctgacctgtttccatccagagtcggatcgagcttgaatatgttttgaaacacataaaaaatagctccgccaggcgctgagacgaactttcgtcgccaagggcttccagcatgcatactaagttgtataaggaatcaaggcagcacattggttgatcatttgagtttctttctaaattggcgatcatgtctgcgagcaatgctagctcatgagagtgctgacgaacatcaacaagaagctggatgagactgacagttgaaccgggtgaaaggtatttgcactgaacttgagataagactctatcaaattcaaggagacgctcttctaagctccggcaaaacgtttgcatatatgggatggtctgtggaagcttggtgaaataccgtacagcgttgagcttggcgcctatctcaatgaaacactgcaaaagcgatgccagggcttcgttggatgaatgtgcgagtgtgtatcttcgatccactccaaaatcatcgtccaagcgcacgtaaatagacgtgggaaggccctgaagcatgaagattgtctccctagcaagctgggattctgtgataagtcgcgaggtggttgcttctgcttggggcaacgaatggtgattctcggctctccaaaattgggccttttctatagaggcaacaagatcgccatcctcttccgaaacaaaaacgtcatctggaatgatatacccttcatccactgttgtggcggattgaggtctgtccttgggaagagatacatcactggcaacggatgaaaagtcgtcatctgatgagtcgccagcaaagtctacttgttcccaaatttcttcgtcgctgaatgccgtcccagctgcatcaaggtccgaccaagaaagagtctcttttgcttctggtgccttggcccgttccttcggacgtttgaccgttgacaaaagagcggggcgatctgagagttgcaataagagactcagaatctctggaagccagggcatccggtcgctctccagctccgcaaggcgggcgtgaagagcttcagcaagttcatctctattcaagatttgaaacttttcctgtagtccctcgagttgcttggcgactgcaaactggtcggtgcgcgtatgagaaccagttcggagcgctccttgtacacggcgcttcagactctggacacgtgcagacccctacttagatatgagtacaccgggtgtgacgatatgagattgatggaaattcaatatattaccttgtggtttggtgatatcttagcgacagaagtgattaaggcgtcgataagcgtactcagatcagccgctagagccatttcaagacattggctcggatccaagatccaagataaatcacatcgagatgtctctagacgtcatagagtgaagaagcattgaagtgaagagagacccggctgttttacgtggatggcactagtcccgatgaggtaagatggccactcttatgcgcgcctctctctctctccgaccatctcccccctttaagcacatacaatcatcatggctatcgcgcgtccgattcgcatgctgggtgcagcatgcattcttctttgtctatttcttgtcttccaattacaccagagctcctctgaagaagggtccaagttgcctcatggcatgaaaaaggatcctcttgtagatcgtgcgtgaccccagtttcttgctacacctcccacaaccatcgcactctaagtgccatactaactgatttgatagcgaccggcgaaccggtaggaaacttatggcgagcggacgaacacgattactcccccaacagcgaacaatcggcccgcaccaatgctgcgctcattaccctcgtccgcaatgaggaacttggtcagctgctctcgacaatgaccgacctggagcgaacatggaacagcaagttcaactatccctacatcttcttcaacgatgtacccttcaccgatgagttcaagcagaagactcaggctatgaccaaggccaagtgccaatatggtacgcattctagtccggatagaacgagaggaaccaaacctaactttatatgcagaacttgtgcccaaggaacactgggacgtcccagaatggatcaatatggacctcttccgcgagtcggcaaagcttttggaggaacaagacatccagtatagctccaaggtctcctaccaccagatgtgtcgctggaacagcggcatgttctacaaacaccctgccctcgaaaactaccgctactactggcgcatcgaacccaatgtcaagttcttctgcgatgtcgactacgatgtgttccgttacatggaggatggcaacaagacctacggcttcaccatcaacctgtacgacgcaccgcagagtatcccgaccctttggcccgaaacccagcgattcctcgccgccaacccgtcgtacctcagcgacaacaacatgtgggagtggattacggatgacgtggctcgtcccgagcacaccaaggccgcgaatggatactccacctgccacttctggtcgaacttcgagatcggtgatctcgacttcttccgcggcgaaaagtacgaggcgtacttccagcacctggatcgcgccggtggattcttctacgagcgctggggtgatgctcccgtccactccctcggcattggtcttttcgccgatgccgccaacgtccactggtaagtcacatacttttatctcatttaagaaccctcactcacatgtatctccactaggttccgcgatatcgggtacaaccacatcccgtatctcaactgccccaattctcccaaatgctccggttgcaaagctggccagttcttccaaggcgcagacttcctttccaaggaggattgccgacctacttacttcaagtatgttggaacgcactaattatcatggcgtcccgtttgagctgttctctcgtctcttgtcattctggagagtgcctcacgactcgattcttgcatcaccttgcatacccctatgactttattcctgaatatcagtggcttggtacccggcgtttgagcggacacatacctgtgtgtattgatgattttgtgttccccatttttccctccctgtttttgatttaattcccttgtcacgaaatacgttcttggctacgttgctgtcttctggagagctacgggggccttgtctacattgtacttatatcgcttgggcatggtcattggtggaggctctgtttatttcggtctggtgcctcttggcctgcttgttgcagttgtcattttgtgtgatatattggctacttaggaacaaaacccgagtcccaacccaacctggctattctactattttgctgaagcaatagaccttggataaagtataaaaaagttgataattaaggaatgaggattgaggatcgaggattgaggactgacttgagcggttgataatacaacaatatgactgaacaagatggaatcaagatagattaagcaccaaccaaataaggcacacaagacctttttccatacaacagcagcactaacaacacgagagatctctaaagtatgtatacagttttctcttctacccgacctaatcctcagccagtcaaacggtgctggctaaacaacgtgcgagggggtactgtttgtttaagagaaaattgacgtaaaagtagaattgatgaggggaatttacgcctcctcggggtagagctcctcccggagagcgacgcccagctcgacgcgcagaccctcgagagactcgaggtattgcttgtactggtcggggttctcgaccttggccttgacgcctaatcacgaaggaatgttagcttgggttccatgacgaacgagactagtgctccaggataggatgttgcggaagcgtaccctcgaagacgcgaacagcggtagggaagtcgttaacacggcgggcggccttgagggcggcggtgaggactgcgacggagggaacaagatcgtaggcgaagcagttgttcaggttgcgctgtttgcaaagacatgcattagccatttgtcgatggtgcgtatataggagccgcatgttgagtgatgggtgtggctgatgccatgtatcgcacgccgatcaatatgcctcgggtgaagtcgagataagtcatacctgaagctcgaaaacgtcctgcacaccatcgaattccttctcgaatctgccattgggatacacggtcagcatgagacggccctatcatgtcgagacgattgccgatggtcgttccgggaagcgcctaacatggaaatgcagggcgctggtgtccccctcctccggcctcaatggcttgcgattgggggcgtacctggcagtgaactcttcgtatgtctcatcctcgtggccggagcggagcatggaggtagtaccgaagttgtgggcgcgagcggcggccagagtcaccggagactgcatccgggaccgggtcaattggggagctctgaaggagccggtagagcgagcggcacgggtcgccacgcggaagatggatagggacgacattttcagaagggaaccacggtggaccggacaggaacaatagtgaggggagagaagtggatgggggcgggaaggggaggtgttgaaatgcctctaggattttgcgggtggtgtggtgttggcgcctgaggcagctgaacgggtgctgagtcatcatccgattggccccgttccagtgttctgatctctaagggtggccgttgattggctggagagttgtcggtttctacatgcgtgtcattggtcggtgttaggccatgacaagtcgagttcgtataaggttattggacttcttgttcatattgtaaagatatataacataccatgatggtaattgatgttcaagatatattgtgactcgattgttgtgcagaccggtagataatgattcgagcaattaactccaatatttatcgattgtaaatcctacaaactcaaggagggtgggcaagaagataatttgactacatacatgagtaatagtaatatgagtggtggcttccgagtagagaatagtgaaaattcgggttattatagccggcaacatctgaatcgaagatcttgatagcacgtgaagatagaggattgacaagtaaacaacgtagatattaatctacacttgtttagtcggatatgcttctatatcctgtactgtgaaggtgacacaaggtagaataaacgacctctatcactccgtacccctgtcaagctactgccaattgaaagcttctaatggtaatcaattgtaacccaacgacaaatgactggatttccaatgcaacgcttcggatatggacgtggaaaacggagactggaatcataatgcagcattagctatacagagtaaagtggtcaattgcgaaagatatgtacatagatcagccctcgggcttttatacaattcatttctttgtataatatataatgcgctagttgttggcatttacactagcatgtgattgtttcacaccaaggacaacattgcattcggcaacacagtactctgtacactatattgtgatctggggtatcatgaatcgcaattagatctaattctaatagattgaatctactaaatattagatatgttcggacaatatatccccagtcgatgccaccgggacctgatcttccccttttttatggcacgctaaacccttttgggccctcaacggacgcgccggacgcaaaaagtcactgttctcttatttctccagctttctccctctctcctcttcccctttcccactttcgtttctttagctttctttcatttcctttccttaatttggcctttctttgttttggcggtccattgcagtcccattactgccccgtcaagaaaagaacaggttgccttcccgggctatctctatcttcaattctacatccatttggtttgagagaacaacccaataccctcacaatggcttccgaaatccttaaatatgtcgatgtcccgactctcgatcgaccctttggtgtgcacctgtggcccctcttcgaccaggcctacgagaaggtcatggggtatcccgccagcaagttcaacttcaccgagggtgtgacccctctgtccaccttgaaggagactacaatgatgcttgtcacctactacgttctcatcttcggtggccgcgaggtgatgaagaagttgcctgcgttcaagcttaacaccttgttcatgatccacaacctccttttgaccaccgttagcgctatcctgctggccttgttcattgagcagcttcttcccactctctggagacacggagtcttctacactatctgtgaccagcagggtggttggactcgccctctgatcattctgtactacgtaagttgcgaagcgcttgaaccgggagaaaagaaactcacaactttgattagctcaactacatcaacaaatacgtcgagttcattgatactatcttccttgtcctcaagaagaagccattgaccttcctccacacctaccaccacggtgccaccgccctcctctgctacactcagcttatcggtgtgactgccgtgcagtgggtgcctatcaccatcaacctgcttgtccatgtcgtgatgtactggtactactttcagagtgcccgtggtgttcgcatttggtggaagaagtatatcactatgctgcagatcctccagttcgtcattgacgtcggtaagtcgttgcaggcccggaacctgcaaataacagaatactgacagtttcaggcttcatttacttcgcctcgtacacctacttcacctctgcctacttcccgtggcttcccaacatgggcaagtgtgccggtgaggaattcgctgccttggctggtatcggcatcatcagctcctacttggtcctgttcatctccttctacattgccacctacaataagaccgccaagactggacgtccccgccgcaacactggccaaaaatcgttgatcgacatgaggaactttgaaattccttccccggccggtaccaagagcgccaagtccactggccgctccaacggccctgtgacacgctctcgcaaggcctaaataatcaagtgaaggacgttcgtgtttgaatgttttcagtgtgattgcaagaattgtgctcaagagtttgatctttgaatcatcttaagatgagctattggatctaaagttcatccaatgcttgtggccaaacaaagcagaagtgcagaatggctgctctagggtgatgcgtccctatatttgttttaatgaatgaccactcatgatgccagattccattacacccgggcatggggtatgtgcctcggagttgtcggaacgcgtgcgccaaaacttttgtcggaaatcctacaagggaatgctgttggattaccctacccagcggtctcgccatggttgtattttataatgtcgctttctcttcttctgttcatgtttgtcgttatcactccccgtttggtggcaggccattggattatacctttcgccgttattgttattaagtattgattgatagacgttagctcaaaatatcaagataaatgtaatcatgtttgctgaaatagtgtgatagattggatagataccttggtcagataccgaatggttcgcatctccatccagatccggtctgtatctcaagagacaataaagccaaaccgcaaggttatccagctccatttgcctcgaatattgaaagccaaacaaatacccagcctgttgatatggcaacagaaaagttatatactgactctagcacaatgtgcagtatcacactgaagactgcacagaagaaacaaaaaacgcaggaacaggaaccgccaggtggagcttaaatgcgcacatcatggcctgtgcgacgaggcacagacagcgccacgaaagtgatgtatcgcatatgccccaggtaacagggcgatcattgacaatgcgtcgaatggagaaacgggcaaagccgcagcctcgagagaaaaccaaagactcggactcgaaaggcgaagagaagagtaaggcaggctacatccagcctccggggttgaaaaagcggtgccagccattgatataatgggggcgcaggttcaatagaccagcgccagagacaaagtcaaaggcgggaaactgtggatttatttgctcattgcctattctcgtcgaaaagttacgagcgccttgcttggatgtcatgcgcgtggtttattcggagactggatggagatgcggggctggattttgccgtcggagcatttatgtcaattcgaaatagaacagggaaaaaagagcttggatatgcagtggtggccgtgctgacgttagtgaagatcggcccatgaacttccgctgccctggtcggatttgaaacgctttggatatgaagacggagctatggccgaatctttttagcgtcaagacccactgggtacggggttggttggtctgcaattaagttgaagcaaatgtcaagagtttgacgtgcagaggcttgggttaaagtgtatgcataaaatagggaatatcgagtccttgctggtgcattggtgtatttttatcgtacaacatagatggggatatggtgatatgacgatgtatgatatctatgacagacgagagttaactagctgtaaggagaatatagaggaccatagctgttcagcgtcaccattccaatccttcagtgttgcgtatagcccctgagttcttgaatttaccaacgccaacctcaagccaacccccctcaaggtcagttacccctggcatcttcgcaaggataattttccgtttactcaagtccctaagtgcgtttgagttatacacatggccccactgattgcctgttcccccactatcggccattccacaactgttcaggtcgagtagttctagggaatgcttcgagggacatatgtttcatccggcccttattctcctctttgccactgtgtcgtacttccttgatacgagttctcgtcttgcataatctctcaagccctaaaaccctgatacgcagaaatgcccaatcattgaacaaacgggggattaggtgcatgtgccctaaccaatagctcatagtgatctatcagatgacttttttgatttttttcccccaaagtttcaattcagtcttccggccacgatatccagtgtaacgcgttcttccccctgctgaaacgagcgccatcccgcccttattttcccccatgcaagggtgagacaccaatcacaatccctcctcaaccctcttcaaggttcactacgcgctgaactagcaaagccagcaaaaccagcaaattcagggttattgaacctttccactttctgcacgtggatgtcgtacagggccatggcatggattaatgaccctggatgcctttccctgctactgactccgtacgccgtacgccgtatattggtttgatatatgcatcccctgcccatagctccttggtcccactccggtccacttccttaaagagcccttttgtcgccctggtggatttttggatctcctttgcagctgtgcacctggatacttgacagctattacgttccgttccttgggcctccttttcatcttggtattctctagtcgagggtctttttagtcttgcatttcccttggcttcggaacggtctgcactttggaacagatactctttcttcctttgctctatgaccgattacaaccatatcactgctgggaacatgttcggacctactccctcactgagtctacaccgcttgagcaggcatagcatccaggatcgatacgagtcagatgaggaggctgtgtcggaatccgacacaggcacccaggatctactgtcctcgcctgtgggctcacgagtcggaatcttcgattcagatctcagcgccgacgagaattctcacaatgaccctgattctgatcgggatgaacgtattctcgctccgccagcagtgaaacggccccggcccgtctcttctgctaccatcaagagaaacagcaatgccaccttcgacgaagatacgtatgtgtttgatctggaagatcagatgtttctcgaactgccaccctcagattctccgccacaactggcatccagcacttttttacagccatcgatatacgtctggcccaaaccaccccagccatctaacccaaggtctcgctctgcttcaccctcgtcggtcttttccgtagaggaagcggacatccgggttgcaaaggaggtgactataatggagccccggactcgtcctacagtggtcttgatcaaagccctaggcccacggtccaagacctcaaaatctcgtcctcattcccgctccagggaaagcagccgcagccgctctatgcttgccaggaccgatagccgccgacttaaactgccacgctcgtcagacccagccaagtcaccacgagcatccgagaaaagagccaccacgaagcaggcgcccaagtcagcagaagatccccagctcgcacccagcgcaaccataaaccgcatctctgaaatcccccacctctacttcccagcaccaccacgcaccctcccagcccaagactaccgaacccgaccacgaactcaaggctccgacaaagcaatgcctccaccaccactgaacctgcacgtccaccgacccccctcaatgcgcagtacaagcagcaacagcgtctccacttacacctcccgcccaacaacacccttctccgccgacggcaaacccaacaattacaactacatcgacgcaccctcccccctcaccagagcctgcagtccggcctcaatcccaccaacgccctcatcgccatacttgtccaagcgcagcgggtcctcgacatacagcgtgtcgaatatgctcacaagccgctcgcctctgatgatgcgtcgcatgacgaggaaacactccgcctccagcgtttactcgctaagcagtctgcgctccgaggtcggcgttaacggtccttcttcctcgcagatctctgtcgcaacacaacccaccccgcctcccactgctgacagccatgtcgtgcgcaagtccagtcagcgtcgccatgcgcggcataatagtgtcctgccgagtgggaggggctttatgggattgaagctgggaaagaagtcgcataaggcttagagatgggggtcttggctttttgatttttgcttttttgctttctggtacttaacatatattgatctggtaatgtctttatgggggatctggcgtatggcttggatttctaggggtttgttccggtgttgtttgatattgggcgtttttttaactggtttctttcggtggtcgcttgattttttctgtcttttccctctcatctctgtttttgatcggctaagctaatgtatgacggcccttgacttaggaaagggcagaatcaagtattattctgggatggctaatgtcttcaattttggcgcatggtatgcgatttagagataactattgggtggtttagttacatagctaaatagatagggagacttctatcagatgcagtctgatattggagtctacccatacaccctgaacacaatgatcgtgttccacccaagctcctagtataggtatcttatatcctcggaaccgcgtatcctcagcttatatactctaggatgtggagaaagatggtctttaatctccttgcaagcatacacatggagacagacttctggcctcccatcatttccgtaaaatgcaagcgataccatgcgtttgagggaaatcacatgtcttgccagcgtacaggaagcttagcaaggggtactgtaccctttttttggcagcatagatccggaaatcggcttaacaagctggatgtagatgaattcgataagtgcgaatattgccaacttcacctcgagttggggatgtgctacaacatatgctactactccgcactctgcacaataagaatcgaggagagtaatcgaggatttagtgttgatgtgacccactcccccaatcgatccgagaccggaggattttatgtccgctacgttgtacaattgtccgctagggattcggccgagagtccgttaaggcaagatttggccgtaaacaaggagcaagtggattttagtgggagcctgcttctgcgcctctagggcggctttgatggttgttcaaaaaacgaattagcactattccagggatagtaagcggcacaaaacctcctcccacgatgaacagtctaccaatgccgaccagctaagagtagagtattgaaggtctgtgcacgcgagattcggagaagatccattgcaaaggaggtcacgccacgagccgtaagtgcctcgacgagggacttgttccggaggggctagataaaataaataacggtcgagactttgcgtaaagatgtccatattaatatatcgactcttcttctctggctatgggtccgagtctgagttcgacctccatctcaaacctctccttgccgtatggttcgtttcgtagcgtcgctatttggtctgtcccaaggggaaagtccgactcgaatatcggctcctctgcccctcgcatattagcgagcacgctttgccggaagtgccatcgatacgatacgtacatcggggtaaatagaaaacgcatactgatcaaaacaattgtgtagattcgaagtcatcagtaaaccgttttgaatagagttaatcttcgaaaccctggcatatggtgcatatttgttatctaacgcccgaagttatactcaacccatagaccctccttctctagggggaatatatgggcagcttcgaagccagtccaccaatccgactgcgcaagaaggttgatcgtgccggaaataacgcatctcccgtctctccggccgacctcagtgcgaaatgactcttcttgacctgaatgattaaagccacagacgtgaggaaaccacgcttcgtctgctcacagtttgacaaggaactcttacagtaacgaaaataaccgtatgctatacgtgaagtcttgacatcacaagaaatgtcatagtcgccaggacaacgcaattaattattcgatggtgtgataattcgaccggatgctcgatcctttatcgtgaggatctccgccgcaactagcaacacgttctcgagaatccagatcagattagcgtccgttacggaaccagcttaaaaggaacctcctaggagctgtccgttagacgcatcgtagaaatggacattgcgcaacatgctcctgactgacgacatggtgagtgtttaacagatgcagatctcctaagggattgacatagtgatgaaggaatcgatgagggcgaacttgatgtatgaggtaggtatgcgataaggcaacgatatcaacacgtgacactaagcccagaataagacgttgattcttcttggaggttacgaaaggaaagatgttggtgtaatgctgttgtatggggcacgtgcttgatcacgtgctcgtatgaacagggatcttgatgcctgaatgcctgaatttccagatttgtagttagttatgggatcaaaagcttcattttatgcaggggaccgcttacattgttacaatagatgtttctcgaggagttttcttgggtaattttttggtagtcttttgaaaatataacaattttaaatagctataaatagctgaagcattatatagtctaagcccgaaagctctctactgcaatctctaaggcattatgtgcccggtaataggaactggtggccaattacaattcgtactccacatcattgaccaccactcgtttcaccatggtcagtagagccaacttcatccacggtcgcctggacagcgcccttactatcaataaagtgagtgatgcggtctcgaggaagccaagcactctctggcatcatgaagtaggagatcaatgcgaagatggtgactccagccatgataatgggggcgtctatcaagcaacttagttagcgcgataaaaccttataagaaagaacatcttacaattcagattctcgccagtgactgggaacacgtagggcgagaacaggacagcgacaacccagccgttccagaagacaccaatgaactggaacggcttactccagcggccgagactccactgtggcttcgggaaccgcgacggagtgcagaatagtcgacccagacagatcagaccgtaggcggcagcgctggggacaccggctgccgagacaagggaagtgaaagccgtggcggatggaagaatggtgcaactgactagggcggcgacaacccagacaacaataactgcgttccgtggctgaccgtcctttacacgagagacccagccggagaatgggagtacaccatcacgggcgacggcgaagacaaggcgagaggcggcgatgatggcaattgcggtgttctgagaatgaaagtcagttgtgagatatgagatacccgtgcacaaaatgatagctcaccagccacaaagcgaaaatgcaaatgatgttcatgaagatatggccgcccttgcctagaacaacagcgtaaagaggcacaaagggttggggcccaccgaaacccatgagtgtgtcggcgtcgggctatagaaaaacaaggtcagaatttcgaatttcggcgttcgcaaagacgacgggagacgaacagcgcagaacaaaaagagaataatcgtagccaaaccaccgaacccactggcaacggtactccagaaaataccacgcgcagcagtgatcgacgcattcttggtttcttccgcaacgtgacccgaggcatcaaacccaatcagaatgccagcggtagcaagataagaaagacaccagttccagccagccggggctccggtaccgttgtacgtggtcatgaaggcctcgtgggtggtacggaatccccaggtttgagcggtgccaatgggcagccagacaatgttcaggataaagtcgagcatcacgactgcggaagaccaccaaaagacatatttgaaatagcgagctagaatgctgtcagaggtgatgaatcaaagttacgcgtttgtacatacgaggcaaaaagttcaacagggcggccagagcaagcaagatctcagtgcagatccactggactgcgcggaacttcacgctgcttgagtctgatgggaaatcgaggttgaatacggttatttcctaaacgcaatgtatcagtctgaatcccgggaaaccaagaaagaaaaaaagcataccgcaagcatgtaattcgccgcagcctgggtgttgcctataatcaaattagcaccatgtaatccttgtcttaaggtagatacgcaacatacttgcacagaaagtcgtccaagccgttgtactccaccaggcgacgataaagccaagcagtcggccaaatcgaggcccaccagcttcggcggcccacaagtagattgacccggcggatggagaagccgaacagacctcggcgatgacagcagcagtaatgaacgtgaataccatggttactaggtaactagtccaataggccaggtttccaccggcggcaataccagtgctgaaagtaacgcggacaccgccaacaaagtacagagcagctagatagagtcagtataaatgcacccacaaagtagtgacagcgaaaaacgtaccgaacgtggttgaaaaattctcgaacaaagtgtatgtccgatgaagaacctgtttagtgaattagttgctgaccacgagacatcttaaatctacgattcgacgtactggcttatagcccatagtttcctagaagatttcatgttagtttgatgtttacaaaacaaggcctggatacacctaccaataaagcggtatcatcctgtttcttgagctcagcccggtcaccttcaccttcatgggtgaggaggtcggcggaaccggcgacagggtcgtgggaagccatatctgaatgacagatatatagggaaaagaaagaacccaggtgtctgtattttctggattgagaagagatcagaaattttgaggatagactttccaaggttcgtgttcgtcctgcggtcaaaacgttcgcaaatgctccaccggaaatattaggagacgccacagccttaagtggatttgatttgatgactacagatgacctagttgggtaactggttaagttatgagtacagtaatttatcaagtgtattatatatattattatatgcctgtcttgatcttccttgaagattattcaattgccgcgcatcgcgtaagatcaaaattttttggattaagtttcaaagagggtccaatataaccttggaagctcggagctttctgatccgtcgagcttgacttgtttattaggtagtatataatcttgggggtttaatagagaagatagatttgtaaaggctatcagttgttataattattcccgtacacagccgcttccgttacacggactagaaggccgtttttggtaattcttagcctcgtgggagatgtttcacccctgagctaagactactagcttgccttgttaaatggcgatatattgtgtacctatttgtcaaatactgtcgttataccaggttatggtgccacacagctcgtggtcataccattcgcaccggggtgaaaatgaatagcaggtaagctcccatctaaggggatatgtattatcgcttttgataataattcaggggttttttgctcgattaagattcgtaaatccaatgcccctcatagcaaatctgataggccgatggcatcatatcatcaacggaacgaacaatacagccttatatcgacgcataagaacggtccgctaatatccactgatctcttagcagattgtgaatatccgcagtgcaatggaccctaggatcctcaacagattccattcctattaccacaacttaacaatctgggaaagaggcggcaaggagacatttaaggtatggacgaccggtacgggaactgggcgttactcctcccaagcaaaggtcctctcgtcctgctggctttggcattgtttggaaacacgtcttttatcaatggcatcgtcaatggtcgctctctcgattctcattgcggttcatctttttgttcttttcttccatactgtttgggtgccatggctgttccttctaaggttggactggatccctcatgctagctatggtgatggcggcacactaagatttctgtctacaaggaactggttgagaaggaggaattaatcgacatatttacagggtctgtgggcgacacggaggctgatgcccttgtcgggagacttgcagttggagctgatgctccgttaagacgggaaattttacgcgctatgcttttgaaacaacagagtacccagatgaggagagaaggaagcaaactatacaaaccaccgacctccattgctatgcgaacgcacaaagaaagaagcaaacaaagaaacaatctcaatatgacatgtgatagcatgtgacaatgcaattcatgacagaaagtcaggtattggaaggctaggagcaataacaacaataagagacaacaacaagagacagcgacaagacacaacaaagtagacactgaaatgaaaagggaggaaccttctaccctcagattattgtttcatcattgggaacagagatttatccctgtaggaaggagatgagaacagagccccttttgttaagctcctaatggacaatggagaactcagagaagtacagtctgtatccgcagtggtcagagggagagtgcttctaccgtaacatgcttcgtgccattagaccaggaccgaagccccaacctagtttcagccttcaacgagccgcagcaaagttccaatcagaatcctcaggatttcccttcactggacagcagcagacgtatgttgaatacgaatctggagctggcaaaagttcaaaaaattaaaagggtactcaacaggaacacgatgtgcaatgtgggcccggagtgttggagaagagagaaagaagaagagggagaggggggagggggcaggtatttataccctcccagtagcttaaggtaaatgggaaactggggttggtgacggtttttgaccaaaagggaaggcacctgatcggggacaagatagcacgtgtgaagagtcatggaccactatctgctcctctatcaccctcgcattacgaactgcaacctacatgtaccccctaaagctcgtacatcggatgatcaagggtttttcacttaattcatgccatgcgccatggtgatgctagaggctatgatcatgaggattatattatcattttcctggtctatatatacatgctgcttcatatatatgctatgatgcaggggggctaccagactaagtctttagctataaaagagtcaagttgaactcatggggtatcaaaggaaaagagaggcaatatatgcatgatgacatgtcgtgaagtcgcagagagatgtcgactccagccagcttcacatcagggaagaagaatattcgtctgaacttcctccaaggtctggatccaacctccaggaaaggagcgtctcttgagccagactccttctagggtctcgagtgctttgtcgacgttctagattatgagatattagcattcggacccgcctcttgatgaagttcatttgcgacataccctgaaaccaaaccgtttcaactcctgcatagtttggcgaacaaatttctgctcgggctcactccgagtctcctgtccggcaatgaaaagcggccacagaaaagccaattggcccacatctttcggcaacttctgagctagtagaagaatccgactaacaagcatgtccatatacgtccactcagtgatccaaccgacacgcccagctccagcgatctgaagtagatgaacgaatgtcgccttctcgtatgcttcaatgcaacccgcatactcaagaacgtcaggatacggatacagagaaaggctctcatcatccagctcggcgggcagctgtaggcagggaggggtcgtaacacgccatacaaccagctggttgaagatgtctttatacttcgcatccgactggtcggttgtcatccacgttttcttgtccgatgcaaatgtactgatagctgcttgcacctccattaggctggaccatgcctgccgcagctcaaccaggcgtgggttgtccgggatcgttgacaatagacttggcgtcccgagattgtattcccaccctccacccatggtattccagtaattaccctcgaccacagtcccgccgggagtcgcgcatgaacctgccacatcgagatatgagagtagggagacgaggaatgggcggagggggtggttcgtctcggcgacgcgttgtacttcacgtgccgagtcgccgggttgcggatagaagaggaggttgtagatttcgcgagctcctttgagatgtactgcccagttgttgtgttgggagtccatcatctgcaggaatattagtcaattgatcatggctagcagatctagaggggaaacgaacctcgaatagggaaagtaataggcacgtcgcgaaatccgttaatccaagctgctggctggggtctgagtatcgtgcacgaaaacccttcactaccacgccgtatttgcccattgcctgctggaaatgcctattccgctgcgatcccaccgatgtgttcgcaagatgtaatgcgcctaatgcctgcatcgcattggccatggttggagacgaccgcgcgaaatccgggaaatgtgtgcggtagggattggcattgtgaggggtgttgtagatgatcaagaatgttgatacctgatccgcaaaataagtgagataacgctcttcaatgcgctggatcgatttcgcgatactgatcgaggtaacaggatgctggaagcggaacttcgttgggtgtggcagcgttgtgggggcgaccatagccttgcagaccgcattgccaacatcttccctctcctctaagggggagactgcaggagcgtcgcttgactctgggctggaggtcgaatcgttgttctgcgtcttcggtgccctggatgactctggcggtggatccgtcggtgtctgagagggcccgtagaccttgaacgtcatccgcccttgagcgccatcgcactcgtgtccaagacggacacagttattacaggccggagatgcctcgtcgcaacgaacatggcggcggcgacaggtggaacagcctgtaaatcctcggtgatgccatcggcggactcgttttgggggttcggtcggtggtgtatgtgacgtgtccgacaacggtgcaccctccctgcgtgtctccatcgggcgcgaaactcgaaagtaggatattgttcagacatggacacttagaatgaaggcgaatcgacatgaatcatgatggatgttataaggagaatccaaccttggaagtatctgggtttggaggggcgctgaacggcaaaacgcatcagctcttggccaatggcttttcatttttctatattagaatgtttcaaccaagcacatttatacccggttttcttggcccttaaaagctcttggctcgactctagcgtcaaggcatgtgcaggagctgaacatagcgctgtgctattctagttggctgttttgaagatactacagaatcaaagtggaactcgaaggattcatctagctccaatctagaccaatacataacgtaaccagctattgaggaatcccatcctttaaggggctgtttgtgtatgttaaccattactggttactccgtataggcatcgaacttgagagtcagtttcaaatctaattgagaatacagactcacttacaatgcactgttcaaagggcacgctggagttcagaatggcccccatggccgcccgggcaatcgtcagtggtaccccgatatgcactgcctgctgctctgcctgttggagaacggcctcattgcgcgagggaacgttcacagaagcccgggtggatttgaaacgagttgcctcacggacgtatgcggctctataagagttaatgtgttaatgtcaatgtcgtaaataaacatttcaagtcctgctcagggacggaggtcggagtacaaaccgccgatttaggagctgaagtatttgatcgtcgatatcatctagcgcggttcggatctcatccaaagtgttacagcacgtagttaacgtgccatttaatgacgaaaaatggacgctcggagtgccccatggcaccgggcgatggtctgctgaaggtgctgaaatcacattggaaccatagcagttcgcattggcattggcattggcattggctgttgaaccaatagcagtggaaagggttagaaaccccaaaagtacctggaaaatcatgataacaagttgttgtaaagaactttcagggtaataataacaataatggcaacccctcgttgatcgcctgccctaaggggttatgatcatcatgggatgttcatcaatacgatatttcaccaaagatatacttcgccaaccaatgcggggaaggtaacggatttcactccgagcttcgtgccgaaacccctcttcggatgtttggaacttatttaaaagctcttgcttctttattctgacttctactgtcaattctcttacaccaagatgtcccaaggttcaagactccaaggcaaggttgccatcgtcaccggtaagactgttattccaaaccactccgttgcggatgctaatattctcttttcaggaggaggtaatggattcggtgcagctatcgctcgacgattcggcgaagagggtgccaaagtgatcgttaccgatatcaacgttgagggcggcgagaaagtcgcctcgcagaatccttccaacctcatctttcagcgccaagatgtcacacaagaagcggactggaatatggtgttggatttggcattctccaagttcgggcgagtggatgtgttggtgaacaatgcgggcactagctatcgcaacaaggtgggttcaacatattgtatgaggggacctcgctaatttcctttagccgacagcagaggtcacagaggaagagtgggagcgtgtgtttaaagtcaacgtgaagagcatttatctttctacaaaggccctgatgccgcgtttcatcgagcaaggccagggtgggtcggtgatcaacatctcctccacgggagcaagtcgaccacggcctggattggtttggtataatgccaccaagggggcagtcactaatgtgagtgaatgttgggactgtgaatgaaaatgattattgaatcactaacaatccatacaggcgacgaaaggtcttgccgcggagtacggtccccacaatatccgattcaacactgtcgctcctcttctttctggtactggactgttttcgatgttcactggtatggaagatacccctgagaaccgagagaagttcatcggaaatgtgccattgggccgactcaccgatgtggatgatatcgccaacatgtgcctgtacctggccagtgacgaggctcgttttatcaacggcactgagatggtagtggatggtggaaagtgtgtttagatatccgagaccagacgaatcaaagtcacaaattaatttctctatcccgatttaccccgcagaaacgtggggtatcacgccatggctcattctatctcctggctacataactcacctctccactatcgccactgatgtgagcccaaaaatgacatccaacttcaaatcaatcccagtcatcgacctatccctcgccaactcgcccttaacccgacctaagcttctccaagaactccaccacgccctcacgtgcattgggtttctgtatatcacgaatcacgatgttccacaagacgtaatttcagacctgaaagatgctctccctaaactttttgccctcgatccggcggtaaaggaagaagtggctttacacaactcccctcactttttgggatacagccaagtaggctcagaaacaacagccggagtcgcagataaacgtgaacagttcgagtttgcaaccgagctgccagacctatggcgtgcgggtcttcctctttatgaaaggttgaaaggacccaaccaggtacatcaacctctactcagcccatcagtcatctggctcaaaagttatactgataaaaagtaacagtggccgtcacaagacctctctcttcggagcgtcatcgagagatatatttacgaattaacaaacctcagcgagcgtttcttacgcttggtcgccgaggcactctccctggactccaagactctattctcattactctcagaacagcaccgtctcaagctagttcattatcccgcctcagatcctggttccgattctaatatccaaggcgtgggtcctcacaaagattcctctgggtggtggacgtttcttctccaagcatcgcccccaaccgtgaagggcttacaggctctcaacaagagaggtgaatggatagacgttcctgttattgaaaatacgttcgttgtgaatatagggcaagctttcgaggtggttactcacggtgtgtgtaaggcgacgacgcatcgtgtgttgtcaggtccgtcggagaggtatagtgtgccctttttccagggtgttcgggggagtctgacaaaggaggaggcggttggaactctaagggatcattttgctgtgcaaaatatggcgttggaggcatccgagggtgcgagtgttgactcggcctttttgaggggcaggtatgatacttggggggagtcgcaattgaggacaaagattcggagccatcgtgatgtagggcgtgtcttttatgcagatgtttttcatgattatgtcaatgacgatagctgagatcaaagattgagtgagaaagtcggccagctggtgagcggacggttcaccatatatattgcaatatgcaatattgtcaaacagaaaaatgagtgatcgcgttaaagtaacactcccacatcgggatattccaacttcatgataggaggttagatcatatttggatccattcaattactacttgggttgactagcacttgctctcaagtgctcccaactgctgtaaatatgtacaaattgctaatcgcaacacccaaaccagaaggatccacctaaatatataaatcatatgacgcgcaatttgaatcaatcagcagaaaatctggagccaaatctctcactcgtggtcactcgagggctcgattttagaatctccccgttcaatagtcaacaccgttggaatagcaaccaacaggctaccggcagttagaccccagttcatggcaaactgagtcatggcactgacgccctcggcgtttattctccaggccatcgcaccgcctgctggcttcaatgccgaataggctccgacaatgacagcatttactacagggtcgcgggagcgagcccccataatccagtagcagaatgattgccaaaatgaatcataggcgccataaaagaaatagagaaacattggtccgaggtattcacttcctgctttgtaatcgatatcctgcttcagaccttgtcgtaaacgctgggtatcccagacttggaaacggtagcctccgccccagatcgccatcccggtgacgaatagtatagaccagccaatcttggctcgcgtgcgacgattgacaatttggaggtctagcatgaaacccatcagaagcccgcctgccatttgtgcgatccagtagagggctccattgagagcgcgtgtgcgtaggttgaatgtcatgccattgacagcgttctgttgataggaatagaaaacgtttgcagtgtagaacatgggatagaggcacatgttcttccagttgaagactgtacgcagtgtctccatcacagttcttttgaggttcgtccagttgacagccttggactcttgagtgatgcgattgccgtggtagtgtccagaaagattttcggttgagcagacaaacaccgataaaagccatccaaagagcatgacaacaatgtaggctacatatgtcgagtctgtcaccgtcccggattttgagttgtagttgagaccaaaactggccagcgagccaatggttgcaccgaggttgaatatcacccaaaataccccgatggctctgccgcgcgtgttatcgttggtataagtgaccatgatggttccttgcgcaacccaaaaaaaggccgcccccaaaccaagaatcgcgccggctgcaatcacgaaagggccgccattcttcctcctgtcggaattcaacagtgatccggcatagagggcataggtccatccgccgatgaggaggcatacacgtggcccgaggtacttgtaaaaggagcccgccaaaagcagtgctgctcccgctgtgcatgcatgagttgcgacgttggcgttggcggagattgtgctgtcgacttggccagagcctcccatgccggtgagtgcattatacattccaggattgcaaaaggaaatcactgaaacaaggccgatctggaaccaaggttcatgatagatcctagtgacaaagtttttgtgcactcgtgggtaaatgacttcggggtcatcgttgtgcggagaaacactatcttctaccgacttggtggccatgatgggataggtagactcgagatagatatattgggactgaacatgtcaagcgctgggcattttctagataagtatatatagacatagaggatgtgaccctaatctgttccagactttgaactatggtgtgctgggcccgcaatttggaacaagcggatctcgcgcaccgagatccgttcttcacggaagcgaccgagatacggagacacagttagacggcattgatttgattttctacataagagcgtcgcttcaaatctcggttgcgtgacccgaaaacttttgctcacgccatgacgccatcagattgcgaacaattggaccaccttcagaccgaggtgcgcagtgcctatgcacacccaatcgattctcttgatactttagacctctgtaccgccttcaatcatgaggagtcacgagtatcttcctcagtcgcgtgctgtctaccggcagttgcatcctttgttgacgaattagtgcctcggttgcgcgccggtggaagattgatctacgtgggagctggcaacagcggccgagtagcgatgatggactgtgctgagatcccggtcaccttttcaaccgatgagggtcaatttatcgctctcgtagcagggggtgaacaaacagctaccaaagcgcaagaaggagcggaagatgccgaggaagacggaaccgcgcaactccaagccttgaatcttactgtcaaagacgttgttctcggtatttcggcatctggtcgcacaccatttgttctcggggctctcaaattcgcgcttcaaaccgggacactgacggcaagcattacgaacacgtcgccgtccgcgattgatagcctcggggtcgattatccactagttgccttgctaggcccggaattcattgcagggagtactcggctcaaggctggaagtgcagccaaacaaattttgaacatgatcagtacttgttcaatgatgaagcttgggaagacatatggaggtcttatggttgaccttcgagtcggaaaccacaagcttcaagcccgaggtcgaagaatcgtacgtcaggtctgcaaagagactatggtactccattcgacaagaggactcgttcttccaaccgagattctaaagaacttccatcaaatacagaacgatgacgcagcaaacaccctgattgccagatgcgatgggagcgtgaaacttgcctgcgccgtggctgttacggatctttccccgagtgaagcaaatacacaactacaaagcgtcgatggcgatttgaaggcttttgttgcaaagcatctaaactcgacttacatccacggaaataatgcctcagtcgaagtcgatggtgatgatccggaatattttctatgcatcgatggtggaggaaccaaatgcgctgtatcaattgccactaaatcaggtgttgtctctcgtggctatgccggcccctgcaacttcaataccgtggctacagaggagctcgtaggccaggccaaaaaagccacgatggaagctgtgaggcttttaccgcggaggcgacattcctatctcaccaattacccccgattcagcaaactatgggccggaattgcaggcatacaccatgccgagaagttgaacgtactcatcaatcgtcttgaaagggcgtttggcgtttcgatggagagcggtacgctccgattgacaagtgacggtgcactccttggcgcgtgcatcgagggcgatgcctctgttaaaacaggcatcagtctcatatcaggcacaggctccgtagccactgctttcagaaaggactccgacggccatgtcgtcgaagttcgtcggacaggcgggtggggccatcttatcggagacgatggaagcgctttttatattggcaaaaaggctttgcaagccctgctgacaagcatcgattccagcgaagctgacgagagctgcttgagtgaaatggagggggaagtcctggcccatttcggctgcaccaaaaatgccgtgctatctcgcctcctttattctggaaaaaatccgaagagcgacatcagccatcttgcaaagattgtgacaaggctggcttttcgtgacaaagaccctaatctccaggctcttgaaattctcaattctgcagccagctcgctagctcaactcattcagccgctgactgttacctgccctccagccagaagcgtgttgatcctttctggagcactaatgggcgtgtcgaaattcagagtattgctgcatgaacagctttccttggctcatgttgctgcttttaaggaagtaatttccatagagagtgcatctgattctgctgtggagcttttggctgcacaagcggcctagccctttcatagaatcttttaaaattaaccttaatagtagaaaaacaaacttgctctctgtgtttttctctgttcaatttactcttggtgttcggcctggcaaatgctttaataaggcctatttgtttagaaatgattgacctccaagacctcgatgtaacgacctctggcatttccggctacataaagattacattctgaaaatatatctaatgctggcgtggatacaaaggtaacccatgggtacgtagaagcccctccatggaatcactcagctcaacaacctctaaagttctttcacggacaatcaacgttcggagtccaacttagctgagggatgacgtaccccaataggtgcgttgggggcctccgcacgttttttgagatcggccagaaggatggaggcatggctcaagaagaggatggaggcgttcgccaaagtgaacttcattattacggttctagggtatgagtagaaaggaatgtcctagttgcactgttaatgctaagatgagatctgagtgcttgttattcgaagctttgggccgaaggctgtcttataattattgacggagtcacaaaggtcgagtgaaaattcagtcacggacttatagaatatggccgtcggggcgtcgatcatcttacggagaaagctgattatatcgtactagggctagggccaaggttaattatgatgctatgattcctttttttggcggctgtgtatgagtgcagtgccctgtagatggtcttgcatataaagcttgaccactctcaacttcgtaccctgcccatttacatctttcgtttgtacacacaaggctatgattctattagatgcgtcagccgtgagagtgagaaaatctctgtcaattctagtggatatcagggtccaaccccgtttgagggtcatcttgacgcttgaattactgagtagcaccgttttctacaccgctatatacagtgtaatgtaaataactcatgggatcactcatgggtgaattcatttgcaaatacttcatgatgtttacattggctacattatacagctgtatatagggagtagtaatggattagctagggcccaccgccgaaccgggtgcgggcgggcccgcgaggccgcaaagcgcagatcttccaaaggtttcttaattccttgatcccatttgaatcctgggcttgtaagccatccaaaaatatggagacacctaggctgcgccaaaccccaacacaactcagcccactattgggttgtgctttagccgttagtgggtttcgggaagtcgtgtgattctttggagttctgctgcctggttgtcactcttcgaagtttccgatattgcgactactccgcactttcttccctcaaacataactcaaccataatcatccgcaacaacaacagacctaaaaatcattatttcaagagccctcacgctctgtcatcatgaacaccaccattcgagaagagaattgcaaatcagtcgatcttgacggctttggctccaccgccgacgacgcttggttcgattaccacactgcacctatggacggcgaggaagagactggggcgcatccccatcaagttgcggctttcaaagcgtacatgaaaggcgactccacaccatccgagacagctgccatcatgaccaagcctcatgatcccgacgagaggactgacatacaacgccgacatacaacgccgcgtactgggcataatcgaagacgcgctttttcagctgcccttaagccacacgcccgccctcatcgacttgataaaggaaattatcaaggacggtgatccatcctgactccaggacttcggcaactcgtggtcagatgaatggaagcagagccactggcgcggcgcattgacgaatcggaatccagccacgagagggaagaggcgcgaggcccacgtgcacctggcctttgtggaggcctcttgtataatggctgctccgggtccgcgtactgaagatggcatattgcacatcgtgaaacagtcgctgctgaacagctgacaagctagaatatatattgcgagatttctcatttcccaacccatgcctcccgagtagcctaccccgtatagtagaataacgaattctaagcatatagggagcagtggaaataaagacctcgggaaagttgctgatatcgcttatcgtagataacaccatcctatgctaatcttgcgtcacacctaagctgttgcacccgttgagaattatttgattgactctgcctttactttttatctacatggcgtctgcgtcatatggcccgaacgctgaacaagtcgcagcaagctgtcaaacgtgccgcaagcgaaaagttcgttacttttattagtctctttggtggattctaacagactcgaataggtaaaatgtgaccgcacgccggggagatgccaaagatgccatcgatttggtgcagaatgtgtttaccagtctgattcgatatcttctcatgcgtcgcacgtgacgcacccagccgacgccaggacgcaggctggactacagcggaaacgtgcttggcgctcctgcattcaatgcaaacgagctaaggcaaagtgctccgggggcactggctgtgttcgctgtactcggaaagccttggagtgctcttatgaaatggatggtattcctcgaaatctatccagtctcgaggcaaggtcgcatgcagtccccgcctggctcatgacagccgacttgccgtcaggtgaaggattgaaccagctcgttgaagtatattttgagcgtatccacactgtgcgatgtctaggattcctacacatcccaacgtttatggagaagttgaagagctctgacaaaatatataccgaggaatccgggcttcttcatgtcatgtgtgccttggccgcgccgtttctctacggcgatatctgcagtcacggtgatgacgttgtcgatcgcgaattgagattttacgaggcagggaaaggttgggcagatactgcactgcagtattcattccgaaacctaggaacccacaaactggaatgcttggcgacagaggttctgcttcacgaatactatttacgtactggagaatatgcgaaagcattggtggtttctgggcaaattgccaggcacttgcagctccttcagctgaacgtggaatatgaccccgaagctcatcggaaagcacgattgtctactcccgtcaaggaaagcaggaggaggcttatgtgggcttgctatctgctcgatgctttcattgagtgtggcatcgatcaacttcgcctaatctcggcggaggatatccatgtccagctgccatgccctgaggatttgtttattagaggtacgccttgcgttacggaaacgctccactcccgcgaagtacctcctggcatgcatacgcatttcgatattcccgacatgcgagcattatatatccgtgcaatcaggcttcgtgcaaagattcttaagtacatgaaagagttagaagatgaagtaccctgggagtccgacaatcggtcgcggttctctcttctcaatacggagcttcagaatcttgaagcctccattccagatgcattgaaaatgactaccgcgaacaagtatctgtataaagcatcagggcgactcaatctctttttcggtcttcacattgtactctctcaaacatccaatgatttatatcggatctgtgtctcacagctggtattccccgatacctcgaccaaatggatccgagagcatgcaccaaaatcttttctcgaacggtgtcaccgcatgtgcttggagaaagcagtatatattgcgaccctcttgaaggatttatggctgtgtcacaagcccagtctcattgatacattgtatgcaaaccatgttcaaatttgcagcagtgttttagtgactactcttctctcatggggtgacaccgcgcctttgcttccccaatttgactataagagttatcgcacaatgctgcaagataatctcacaatcctgcagtacctgcaaaagtacctcaatgtagatgcatactgtcagtctgcaaaagaagccctgaaacggtttaaccagcttttcccggcagaagctccatcacaaatccatcgtccattaaaggatggcatgatcaatgaccaagtggtgacgcactcgcagtcctcccttgagtacattctgaaccctttgggaacatatcctttagctcggaagcagacacaagatcagcctacattcaataacaccgagaagggagaagccatagtgggtgaagcgctcaatatgatgcctgaacaaccggtcacaattggtgatgacaatgttgatagtttggatgaatcggtctctcctagtccttttgaatgggggtcggagactctgatgtttgattccgcaggatatcccactttcttagaccagcttacgggatggggctctacgaacttggaatggaatgaatggggaaattaaagatggtgtcttcgtctttttttgtttaatcaagcagtatgttagagtgaatataccctggcgttggaaacgtcctttttttatatgttctgaatagattatatcttcatctgcttaaacgacgaaattccctagatgccgatttcaaattccgttgatatcgcttcacgctcgtgataatggcgaatgatgaggtgacaagagatagacctcctgattggagcggcgagatccgtatactgaccggatctcggtcaagccccataataaatccgacaatgccattgagcttggcataaaacgaagtataaaatgcgatggtatgtgagatatgaatgaagcactcgaccaatccttccttgatcaaagataaatcgacattggaattcctgggttactttctcattccatctcctacaaacatgaagactctttttcatgacacagtgggcttagcgcttgcttgttcaacttacgcttcatccttccatgtgttcgacaacacagcctacgtgaacacgtcaattggctacggaacaaccaatatcaactggattcccgcatacgtgtgcaacccgctcaccgaggggggagttttaccatcagccgatgtatggaaagacattgtccttgagtggaatatctatccaagttacccactggttctcgactgcgaagacctctatttcaccgatgcttccacggcagatcttcacttggagctcatgtctactctgcaaacctgggcggccgatgtgattccctcgggtcagattattggctggtacgggctatccggaaacacaatttcttcactgtatgatcactatcgaagcctgatcgcaaaccataccagccatgcgtttttcccgtctgcctacacattcagtgacagcctttccacctggaatgcgtcgttgacgtctgttctcaagaccatcaacgctatcgatgattctttgcccgtttggtcatacacttggccgcagtaccatggcaactattctttcattccctcgacgctctgggaggatgaattgaatgccttggcaaagaatagtaatgtggatggtttcgttatctggggtgggaaaaaccatgccgtgtgcaatgatgcttgccagagcactgcgggccaacagccttggttgaatgccactcgcacctatttgaatactttgtatggcatttatagtggcgacgcggaagttgaagggtcccagatttttggtggaatatagcctcgctttactttcgttgagtcgtatggcattcactgccgctgtctattcacattttgactgttttggccttggactcttgtataatactaccacagctatgaagcatctctttctgtgacttgttctttttgcaacgaatcaattcaaggtagagggttatgtgagttgagtacttgaaaatatcgcaatcaccaaggcatatattccaaattctctagagaaaatcgataagctaataggaaaactgtatagcatactattgttgagatatgaagttttagcatgtgaaatactttacgcgaagatttggctcaatagatcattttcctatatatagtctaaaagtgaggcatctcatatgaactgcccgggtggtctagtggtatgattcgcgcttagggttaacccaaagcattaatgcgcgaggtccccggttcgatcccgggctcgggcccattcttttttcttcttcttctttttaaattgaaggaatctaatatggaaatgctaaaagcgtcatgcgaaatgtcattttgattagatggcaagaatatgtgagggccgcaaaagttctgcagatcggccgatagaacgtacttgcccatattaaccacacccttgttttttttcgctaatttaggttgaagaacaataagtatacatagatcccgcacaaatatcctaaaatccgaaatcaatacaaaagagaagaggtaaaaaaaaaaaaacagggctcgggcccacttatcttttttttgtttttttgctcttcttacattttttacatttgatcattttgaatatattcagcagcatactgtcaacctctttttcattcttacattcttcccgctgaatcaaaggtctcctggacttccggttgggcttcgtcgaattgaacggccggaatgatagcaaaaggagcatgcgctccaatttgtcagttgttttcggcgcgcctatatctaagggctaacctggaccatcgagcgagctttatggtacggtgactgtgttggtaactctcaattcgaggccacagcactcttaaggcggctattccgtcactgttgaatggtaaatggaggaacaagatgaggcagagacatgcgatttctttgtatggcttatcatctattgtctaaaaccgtctaacctcgacagcaggcttattcccaacagcaatctcaatcttctcaataacctcatcggtcaacttctccaccacctccaaagctcgaatattctcaaggacctgctgcggcctcgacgcacccgtaatcatagacgagatattcggattcttcaaaacccacgcaagcgccagttgcgccgttgtaaccccaagttcctccgcaatgggcttcaatgccgcaacctgatccagctgacgctgccaggtatcatcaccaacagttttccggagaccctgcacgtatttatcctccgattctgccagccgcgacccagccggaggagcagcaacatcgttatacttgcccgtcaagacaccgcccttcaacggcgaccacaccgtcagaccgagcccgtgcgcctcgtacagccagcggtactctttctccacacgctcgcgcacgaggagattatactgcggctgctcgacgacagggccgacaaggccgagtctgtcggcgatgcgccaggcgtccgcgatctcactcgcagtccactccgacgtgccccagtagaaggcctttccgttgtcaatgaggtagttgaagccgcggacgatctcttccatgggcgtgtcgcggtctgcgcggtgtgcgtacaccacatctacgtatggcaggtctagccgctgcagcgagtggttcatgccctcgatgatgtgcttgcgggagagcccgttgttgttgagtggtttgtctgggttggcgctgttggctcggccccagtagatctgaagatgggttagtgggacaggaaaactggatgggaaattgcgcttcctaccttggtggaaatgacgagatcgttttgcttccagccgaatttcttgatcgcttctccgagcacgatctcggactttccgccggagtatacttcggcggtatcgaagaaattgacgccggcgtcgtaggcgaccttcatgcattccagggcggtttctatttcctgttaattttggtctattctatcgatcggaatggtcgtaccattcccgacgtgtccgccatatgtgagccagcttcccagcgagataaccgagactttcagtccagtcctaccgagggaccggtattgcatttcaggaagagcatcagacatttttagtttggtgagatcaaggtaaattcagggggcaatttcctttatgtacgcttgtaggggccgacggcggggttacggcggggttaagggacgccctcatgtttccccgattcagacgccgagggccttccgtggcgtgcgaaaaacggggcggcgtctgttttaggctaatcagattggaaacctctggaagagtttgactaagaattgtggtgcaatatcggctgacgatgacctcaacgcaattgaatttgtttacaaatcatgtattatcccccactttcagtgatgactacctatcaggaaacccctcattcatctcaaaactcgcacccagttggagtagcaccaggcgagtcaggataaaccggagtctgcgccgtagaagcacatttacaaaagtctgtttccaaaggtatgtccgagcaaacgctcgccggctgagtggcacagtactcattgatcgagatggaggttgtcatacccggtggacaggagctgtgtggcatacagaaggtgtcatagttcgacgagcctggcagtagggtcatgctgtaccattggtttgcagcacaagagcaggagacgactacaagcaacgaggacacacaagttagcttgccgagtacagcaacgaatgtgcagaacagaagagaaaacctaccgctgatcacagttgattcacctcccgccaacgtgccctgatacaaggtcgacgtcgtatacggaatacccccgttcgagcactcggtggtaatccagggtgcgttgagtgggaaacaggtcgattgctctatgcaatgacctggatgccaaacagacgggaagaatccctgcgagcactcgattggaggctctgggctggagcaatacgaaactggaattcctaatgtgcagtctgtcgtgtacacggcggtttgtccattcgaacactggagctcggggcctggggtgatcactgctgaagctgcagccttggtgatcgaggacgtttgatgagggatagccattgtggctgagataaagagcgcgagaaagagatagaatcggtggaggggttccattatgacggtttcacggttcattgagcaggtatcggagaacttgatatgaaacttataatgaggcgatatgtgattaccgcgaccgagtagctggagcttgttttatatcggtatagatccaacaccgaggatgtccaatttgggctctttcggaaattcggagatcactaccacggtaaagtaacagtggctgaagattagctggggcatcagagacaatgagttcagctcatactacctcgagatgcatgcaaccttcgatcaatagcgatcactgggctgagagaaatgtttcaaatgtgattataaaaatagtacctttctaagacaaaaagacaaagggatccttatccatggaaatccatgccaccgttgaaatgtcagccgaagttgacttggtgatccactaaacccacgtgatatgacgtcgtcctcatgccataatcaggcaccaaggcatgatttcccgcgccagacccacttgggctccgagggctccactccacccgtggaccctgacccgcgatgtatgttgtaggcttgtagctacggtctcatttctttgaattgctagacaactcttgttgcttggctctattgtaaagtatcattaaaattgtcaagcaagaatgccactcaggttctatacggacagctgggcagtattcagatgaagtacttaggaatagaccccaaaaggcagtattatacgattagtactccgtagaggaatttggagtagaactcatatggtacaaactatggaatttagtctacttgactatagttcgacatagtaagccaaaatcctccctggatggctgagtgggtgagagacacgaggtcatctaattgctgggtgaaatattgatcacgggtgataccgcattgggaagctcagcaatggtgaaactagtcagggtttcgatcctcgtcaggagtagttggggtacggattttatttttctttcccatgtggtcgacagaccagcctaagacgaggatagcaccttccccacaaggctccttccaatgctgatatattgatgcaggtgtccataaggaatgacgcacatataatgctatccccgagatcttccgtcgaatggatacctacgccttctccttcaccacccagatctccactcgaacaacaaactcgtctcggatgatctagacatcgtcggattgattgtctggcaacacgcatctgtgctgccgctctttctcgccgctggaatacccaatttttcaaaactacgacgaccctgagttgcttatctttcgcccacctcctcgtccataactatacggcatagacgacgagggaaaggccgccgttcagcgtcgccatacccactttttctaattggccttcacgcagcgtttcaatgaacatcatttccacgccatagatcagccgacgggtatgcttacccgccgcatctttagccatgccggcgagccctgggaagggaataacgttcctcttcaggctgacattgtgctcattaccaaactctggaacgaatactcgaccggcccgtgtccgatatcattctcttcagctgaggctgattccatcatacacttgcaaagtatgcaagaagaagttgatctccagctcaaactggtccgcgacttcattggcgtcggcgtggacggttggacctctccggacgcatatgaagctgcctattcctgcgctcgtcagatgaaggttgacggtcttgcttctctcgacacggagtaggaacgcaagatgacagatcgtcactggccatttgacgaccacaacgaggacgagtagagtgaccgatctctacaatagtgcaagaatctctacatccagcagtgatggagttttgaattgaacaaaaccgccgtccccgattgatttagtatcatcgggttttccgacggccaaccatcagtgttagaatccaacattagatcggcaacgtaacttggactatcttggaagtaaagtcctccagttcatactaccagtcccatctgtgccacgggattgtggcacggactatgtacagcgtggccattacctactgaactacagtaggctgatctttccttcgtatggagataccgagacacctgatgagactgtatgatggaacattgggattggaaaagattaagcgagaaatgtagttcgaccgagacctacggtgtacattcctaagactggagacaaaacaaagtggcggacagggatggaatggaatgcgggccagcgaagaagcttgtatgttttacgtacgtagatccgactataatcgaccaatgaggttcaattgtgtaccagccaggactaatttaaaatatcatcacgagaacggcaatatgctcaatgtacaccctcctcgactgactggaggatgtccaacaatcggaatagaataaaacaaatgtacatgaattaaagctcccagggtacaatccagcaagttcgaggtccaacttgatgtagaagcgtgggatatgtcctctcggtcaagatcatggaagaacgaggcgctggtacgcagcgcatcgggttccagacacataggcggacatcacttaaaccgagttgtggccgtgaccgtggcggtggtggagatgtctgcgagcgtggccggcagcctgtaccggctccacggcttccgggacagtgtccttcttcgcgtaggaaacggccgtggaggtctccacgatggtggtcaacgaagtagagacagtccggacggctccagtgctggtcgagtacacgacaccgttgccatcacagatgacgtaaacatcacgttcgagatagatgatctcttcggtgataggatcgatgatggtagatgtgatggcggtcggggttggcgagggagtcgaagtagaagtgaaagaagtagtagcttcggcagcgctggtcacgtggaggttctcaagcaaggtgttgggatcgatcgaaataccaccaacggaaactgtggggagtgagctagtcgggattgaaatggtgggaactgaaaccacactggacgtggtcgtagttgcagcagatttcatcgtggcatactcagggccccactggatagccataccgccaggcaatccgtcctcgtgcagttcacaattttcgtttttgatcacggacgggacggggaactggcattgacgctgttcgtcttcggtctgaacgtcgaagatctcacagtcggtaacgatacctgactcgcttgtgcaggtatcaatggcctgctggagaatgccatcatcccaggcctgcatgaaatcaccgtggtatccgtatccagtgggatcaccgttggcgagcgcgaaatatccatcgacgtccttgaatgcgtaggtgttccagatagtctcgtagaagagtgagaccaggcgagtttcgaaaccctcagggcaggtaccatccatgacgagcgacgggtatgcgacatgagatttgtggtcagtggagtcgacatccttgccattccagcaagaggggaacatcaactcgaagcggactccgtcagtgcaatgctcatcgaggtaggtcttgttgggcaagaagtggcggtaaagggaggcttcagcggttgccgagtagtccaggcagttgaaaccaagggccttctggcgcaaagcagcctgtgaggcctgagcaccactccaatcggacttgggagggtcgggaactggccaggtgaaattgcgctggtatgggtcgcctgccagcatgcggaagttacttgggaaagcagtgacattctctccgtacagaaggtaatagctgatcggtgtcagtagaaccccactacgaaagccaaatcagacttacgcaagcatgcctccaacctcatccaccacctcggcgctgccattggtgtgcatgaagtacaaagcaggaacccagtaagcagacttgtcttgagtcactgcgcacgaggtgcaatcagactcgaggagcgaggcctcatccgagctcatgccaaagcctaaccataagttagcacatccgtagatgaagatcccatcttgacaatgcgcgcttacttccacctccatgaaccgcgtgggcatgagatgagaccgtacccggatccacaagggggtccagccgggcgagaccagttcttccacggcaaggaagacgccagaaagcattggtgaggcttgggaacagcgcaaagcaggccatcacaatggaggccatccgaatgtcctgcatcttgcgattgttgagccgcgtctacgggcttagtggataaaaagaatgaatgaatgatctcagggaaacaagtgtaaacgacagactcgccaggagtaccgaatcaaccggttaggcgtagagaaaggagtgcgagagatgggttgttgaggctaagcaataggttagaggggaagtcaagacattaagcacagctccatgcagatcgcagattttcaagccaatcctcgtcaaacaatcttatattgcccccttccagtacaagggaagaggaatgaccccttgcttgcgggctgaacacaccaccttccccgatcgaagggaaaaaaaaaggtagcagaggtatgcggacttaccgatcaaacgcgtttctcctgacgtcagtaaacaaagatgatttctgacgatttctgttggcgatgcctgaagatgcgcccatttatcagcctcaactctattttgttctcgatcgaccaaaagtactcacttgaatttttgtaaacaaataataaagaacgaaacagtaaatgagcgacaataaataaggagtgacaaaccctgagatagggcaaaaaaaggcgcgctggatgaagaggggcaggggaacagattaaggagcagaacacggggatcaagtacttcaggcaggaaacttgggaaaaaaacgcatatcccccttagcgcttggagaggggcctgagtttaatgacatggccaatcccttgagatggtagatattaggtaggctgggggcctcgtcacgatcagaagaatagcgtgccctgtacgccgtctatccctactgtattacgattggatatccgaaagtaaaatgagcaatcctggcttaatctgggaatgccagaacacgagggaaaagagaggacttcccgatatctgcgatgaaacgaacggcgcgttcctggtctaaatcactagctccgtcttggtgcgtcttggtgacccacgttggggacggggattggtttaaggggaagatgaaacgatccgtaaattatgcccctatttcttattcgataggggagatttgcaatcaggacggagtgagtataggcatataaaatataaaatctccggagtacaaattatagagagcacagagcacatgacatgccggcggatatacatcagcttcaaacggaggactccgtacctctcgatacatcgtccgactagctcagacagtagccgtttgggtttaacaatttattcctatccctgcaatatcccgatccaatccccccgtaccccgatgtctcagatctcacatgtgttggccgtgaaacagcgaagctttttggtatgattaaaggaggacagagtactccgtagttcaccggcagttcagtatctgatattttacgtggagataacaaattctattcggattactagaacgtgaggaccgaagttgacgccgaaaatgacctagttatgctagttgttccccctgttgactggaaaatggctctctgcagccaaatcaaggtgctctcccttatcgcctagcttgggcgtctataatatgcatcttcgcttccaatgtccttacgccctgccattacctccttggaagtcgacctcagtgttattgtttccgtgattcttacattctaagttccaaagctggcctccctacggaatactccgtgggctgagccgtaacccactcaacccgctatggattcgtgggcccattgaacccaccaaataggtagcaataggaaaaaacgtgacttgaacgcgactgcatgattcatacaattctggatagtatttttaggtagtttatatacatgagaagtcacttctccaatatctacatatctcagcgataaaaatccgtaactaaatgatttttctctctaggactgccaatcagctggcttacgtaccctagcacggcctaattccgagctaatgaacagaatgggtcgaaatgggtctatgggttgtgggttgaattttggcgcagactagcctccccattctcgctacgcttgggatcccctggaagttccctattgggaatgaaaaaacatccgagaaaacacaagcctaccaacggaaccagcatgatgaatacggctcggacacctttcattttggcatccaagatttgggaatcccatcccaccgtgtctggttgtccccgctcccagctaccactgtcaacctgctcgcgaatcgatgccggcagatcaacgggcaacgctgctttcatgaccgtgctttgaatcgcggtcgacaaggccatgcctaccacggacccgagcattcgcatcaagtttcgcgtggaggtggccacggcacggtcttcgggtttggacagggcttgtaatgcaacgagggctttctatcggttattatcgatcgcataatatgcagcaaatggcagacttaccaggctgaaggacaaagccgatgccggccccttcgataatcaggacaattacatacaccgctgtggacgtggttcgagaaaaaaggagtttgagaccagcgcccaacgtccacagcgccatcccgcagtacagcactggagcgtacctttggagcaatattcagtaaagtagtctcacgtgtgcgatcaagacacttaccgagccagcttcgtcattacgggtccagatatgacaccggccacgctctgcaaaagcaataatggaagaatgagggctgcactctggagtggactgtagcctcgcacatcctggaaatatatggggaggaaatacatgtcaacttgccacacggagttatacagagcactttggaggtagatgacagccgtaggtacctggccaaagagacgcagcggaatgattgggatcttcgcaaagcgcttctcaataatggcgaacaggataaagaagaagcccccgacgactagcatggagactactagtgcgctacgccacggccagatactccctccagaattgagtgggatctgtaaatccaaataagataaaaagatccccgatcaaagaatgtggtttacataccagtaagaaaaccacacacgcaatggccgcagccagtccaagccaatcaattttccccagcttttcccgccagctaccagacaccggtttcagcggaagacatatccacataacagccatacatcccgtagcaagaatcgggggaatccaaaagatccaccgccaaccctcacgactgttcgcacgcaacatagccgccgcgatgaaagggccggtgctagccccgagtccaatagcaccgctcaacatgccctggtacttaccacggtccttcaagctgaccaggtcgcttacggtgatttgcacgagggagctgatgccgcctccgccgataccactgagcgcgcggcacacatatagccaggtgacggtctgcgagaacccgcacaggatgtcgcccaggacgagaaagcccacgctcagcaagagtacgggcttgcggccgaagatatcggaaagccgaccgtacagcgcttggaacgcggtctggcccattaaataggacgtaccggtccaagtaatgctgttcccggcgtcgagtgatcgggagatggcgggtagagcagtcgccacggaattgatgtctagggtggagatgaagtagatggccgctagacataggtaggctgatagcaaacgtcggaatggtaaacgtgaggtttgatcctcaattgtgggagttctctgctcatggctctgtacaggagggtctaaggactgtagctcgtgtgacctgtcctcttgaatccccgggatcctttgcttttgagatatgtcttgctggggcggctgtaatatttgcactgggcggttgtccattgtgcccgactatgtggttctgcaaaggaaatgaggcgggtaagacttggtgatggcttatggcgagcgggctgagcacaccatgacacaagaacgtatttggactttatgtaccttttggagaatagggtcagtcagaatgtgaggctgctcggactattttggtgagagaaatcgcgacatacaagcgtaaattacgtctatcatggtttccttggcgtcatgtaaaatacaggatatattaggtctgatgcttgtttctcataaacaaaagacacattggaatacttaagcacattaaaggtgatgattcatctcaacaggatcctaagctcggaaagcgttggaatattgggttcataacgaatatcatacaaatcagagtagattgaagctctaaagtctatcccaagaaggcaatacatatacagtacacagttccatgttgtacagcgcagactacagcttgacctcctctaacgcctttctcgctcttgcaacagactttcgggcacggtgatcagaaaactcctcgacagtcttgccgccatcccgcacaataccgcgaagagcagcttcagtatccagcagcgacgtgcgtccttcctcgcggacctcgtcctcccagaaatcacgagctttatcccacctcttctgctggcgacgcatagagtaaatcaaacccacggcggcaagggtacatgactcgtacacccctgcggatggaatagcgacatacgttagagcggagagagcagaagtcagagtcgtcgtggacacgctgaaaagtaccagactctgagcgagggcttggagggatggcacggtggtggtgagcagcttggtgcgaagatcagggatttgggttggccagggaggcatgacagagtccgtcgccgagtcggggcttgaagttgaaggctcttctaataggccagcctgctggtacttgcccacggtccagatgacctccttctccgcctggcgaaggaatttcctttccaaaatctcggatgtaaccatgcccacgtcgtcaacgcgccagaagagtttccaccatgcaagaccgcgccagcgtggactggccagccctgcctcgagggaactgcggagctcagagtgagcacgctccgcccaggaagttacggctcggtccaagttcgaccgaacctcttcaggcgctacgccggcggtttgatcaaggagcgccttggcgtctctggcgattacactagcatcggctgcgtcaataagggactccactagagggaccagtgctggattcaacgcatccccagtggatgcttccgaggaagttacaagccaatcgatgagaggttgcacaccactgccattccacccacgctcgtagtcggtagcattgtccacagattcacggaatttatccagggctgtgctggcacggttgacatctaccagggacacttgctcgtttgtggatttttggtctgccactgcaagttcaatggctccgcgcaccgaagaggcctcgttcttcaggtctgaatgaccaaccatcgtgctgtacgacagcaggccatccactccacgtccacatacgatcgtgcggtgcactggataccgaacaacattatgccgaccggagtgcgaggtctggatggtaactgtggggacgaggaaggtgtcggcgtggaacgtagcggcgtgatcaggctcgacgcctagggtgctgactaggatctctaagttgccttccctcaggataggtgatggcacggatatcgtcggtagcaggtcattggggatggattgtgagatttcgccatatctaaataacgaatccctcaaatcagtactggtcacgggggatcaacacgcagatagaagacttgttcatacctgatcagcagtccccgggatgaatcggcatcgtaggagtcgagaatgtcttcccagttttctcgcggcgacaatgggtcggcaagtagtagtcgaacaagtttgcgtgcagaggtcgcatcgttcaatccaagaactaggttccaaatcgagaagaaatcagtgccatgctttcttcgaggggaagatctaatgccgaagagagcaatagcccgatcgtacgacccgaaactcaccagctactctgatcagaggcgtttcagactccaatccccgcagtgcaaattgcaaccgactgagattcacttgttctagggcggcatccttcacttcctcgagggcggcatgcagctccttgaaccgcggcggcacgctcttcgcagtgataacagtggatgtgctgaatatccggggagccgatgctgtgattgtattttgagctctggcgacccgtcgagatgtatggggtgtgtcgaggctgcgactggtgttggcgcgcaaggacaaggttcgtcgccagatcgcgcatgaggggcagtaaaagacagagctgatgtccaatggacgcgacaggctctttgccagcgcactgcgcaatcttggagccattgacgcgcggtgaagcgaggtttgtagggtatgtagttatcgcgatggcacttcggtagatgaacttggtcgagcggaagtggacgcgggaacaaggcttggcatccatcactattctaatggagatacagcaagataaatttgcattatatgtttacaaccattgagactatttccctactgatggctacgaaacatgggaaaaagcacacatgtttaactgaactgtcctatttatcgctagaattgtggattcacgggttaaatcgccaggcgagggtaaggatcaaacagatagatagggtatcgtatcgatcgtgtcgggacaaaaggcgtgggcgctggaggacaggaagaagaaatgcatagatcgtgtcataatatctcggctacatcctggtttaatcaggcatccttaggaggatccctctgtcgagaacgggggcgacctgagccagcggacctggtggtttcaattagtatgtggaattgggatagtggcctcaagtgaaaacttacatgctgatccgtcgagcaaccgtggcgagtccagcatcgttggcagcctcatgctcagcccgctccatggccacacgacgactctcctcgctctttgccataacttcttcttggctaggaggcacgtgctcgttctggatatcaaccttacgggcatcctcgaagttgtgaatagcctgtttgataccttcggcacccagcatgagtgttccagcaggaagacgaccgccagccgccgtcttcagctcagtgacactctcagactgctcgcggagaacctggaagacacgagagaggcggccaatggcaagaattttgtttttgatagcacgtcgtttgaactcgctggattcggggtccgttgacggaggcgaaattggttccttatccttgttttcaacgggagacacaggtgtaggaacctcgacgtcgacctcgtcctccaactcttccttcgagcaggtgttgagaatggcgatgagcatatccgtaattttctcaccaacgaagggcaaagaccaagtgaaaacatccatgaagttgggcagccaatatgggtggggggtgcagttgaattgacggatgttcatcacattgttctcatatttgaggacagccgccttgttgttgtagacatccaagtagttaggcgcactgaaaatagtcataacactggggaagccggtggttcgcgtctttctgtacatgcgatatccggcatcctgagcctcgtgtgctctgatgatggagagcaaattgttcttctccaaaaacgcgcatgccgcgggataagagaaaaagtaggaacaaccacggacactgttatgaatgaagaaatcgcctgtcttttcttgaccgaattcctcgagagggtcagcccaaaggatgtcgcacatgagcccgtgggttgggggttcgcggaagcgatcaatctatgtctgtaagttgtttgagcttgaaactgcggacgggacatatacatacagccttgatatcttcgagggtatgcagttcggggctgaggccgccgtggatgcagaggaactgtttgttcataaccgccgccagcggcagcgcacagaaggattccagacatgcctcgtagatccgttcactatatttgtgcttgcactccaacttgaaggtgaagtagtccgtcaagtggcgacattcatgattaccccgcagcaaccaaagtgaatcgggataccagatcttcaaggcccagagatagagcacgcactgcggggaaaaatggtcaggacggttctagattcgaaaaggagactcggatgatctacctcgatactgaaataaccacggtccacatagtcacccaaaaacaaatacctcgtctctgaagggtcaccgccgacctcgaacagcttcatcaaatcgtagtactggccgtgaacatcgccacacactgtaatgggcgcatccatttcgagcaaattaggctcagcctttagaacctgtgtaccggcgtggataatccatagcgcctgctcttcagaaagacggccctcacgatagaggtgctgcttgaggtactggagattgggcttggatgggtcttccggcgaccaaaacatatcatccggaggatagctgagagcgggtgcttggacctctaaggccacgaaagaccgttagcgatcaaattaccagatcttgcgaaagcgaccgagaccactgcggcattacctttgaccaccctctccattgtcgacacctgcgtgttgtcctccatcgtgtgcagtgtgaaatcgatctccgggaccggctgcttctcggtcacggcgcgcgctatagcccgatgcattttgacaaagattgaaatgtagtttgaattttaagttcggagtaaaggggggggggggggcggggggnnnnnnnnnnnnnnnnnnnnnnnnnnnnnnnnnnnnnnnnnnnnnnnnnnnnnnnnnnnnnnnnnnnnnnnnnnnnnnnnnnnnnnnnnnnnnnnnnnnnnnnnnnnnnnnnnnnnnnnnnnnnnnnnnnnnnnnnnnnnnnnnnnnnnnnnnnnnnnnnnnnnnnnnnnnnnnnnnnnnnnnnnnnnnnnnnnnnnnnnnnnnnnnnnnnnnnnnnnnnnnnnnnnnnnnnnnnnnnnnnnnnnnnnnnnnnnnnnnnnnnnnnnnnnnnnnnnnnnnnnnnnnnnnnnnnnnnnnnnnnnnnnnnnnnnnnnnnnnnnngagaaaagggcgggggtgtggcgggggcgagttcagcgcgggcgggatagagctcccacgacgaataagagtataggattaatagaacactgatcaagccgaagttcaaagggatcgaaaaagaaaacagtgcccaggggggtaataaaatgggtactgggggtgattgtgtgctgggggagatgtgaagggaaaaagagaaacaagttggataagcggcttctggctaagatcggtgggtctcacaccaacgttgatcgtgactgtatctgagacgtttcctttcgtttttcttctttagggggcaaagtatgattgatatctggatgatgtgagagacaagaattagatcaagttcagcctcatgacaacgtgatgactcgatgcctaaggcaactgtgatattttttaccccacgctatcagattcgatcgatcagatttcgattatgtcgacatttcactgcatagtgtgagcgttactagcaatattgtatggttcagttttggcctcggcttcgacctttcagcctaggcccgatttgcttagaccgctagacttgcgtatgcagcactgatggtctgcacgagaaatttttcatatctgcagctattgctcttcactcgacgtcggatcttatgaggcggacatttatatgatagggatgcaggcaacttacagctcagacctgccgtaggctagatctacaatactacaaatccctcaagaatgcccccctaattgatatgctacatgccccacagcgtggcagtttgatcaacaatcgttctataaatacatatgaattgagtgagggatatgactgacacaaagtataggcaaggcatattgtaagagcgaaatttgttaaaataccagattggaaaatgttgaagtgcctgaggtgttagggcataatctaactagttagggaattgtcttgccaaggaggcgctttcattcttccgccatgcaaagatatcttttcatgtaaacaaccatgccttgcgagtgtgcgcgagtgagactgattttgaggagagccttggaatgtacggttcttatcagcaggtgcgctgggttggtcaatattgatgaaacaagagatatcgtagggtttgtatcatttaggtagcaaaatgtcgtttttccaagtttatcttagattaacctccaagttcctatcgtactcaaactggctgcaatgttgtcccctgacaaagtatatatcactcactctcctctccactcatcccctccaatcacaccaaccacacagtgctagcgaggagatggcccctaagggtactgtaggggatgtatatgagtgtgtattataaaccagtagccatggatactctctattctctctattatatcccctttgcatcaggcgaataagacttttagctctaaggtttatccttgagactttccaaggttcaacttaagccatattagtcgtcgacaaagaagcaaattatacctaagatgacgtactacgtaactctaacgtcgtctattctactatttctctctggctttgcaatttttttcagcttagtcttcctctatatccatttcaatacaccttggtatcagcttcgctttgatgacggtatcagataatctagactgcaatcagcttggaagattcttgagtgcagtactcggagcgaccgttacacttattctagccaaaatcgtggagaaatgctactattactttcaatggcggtatcgctctgccaataccacaatattcaacgcaagaaccgccgccggtgaagatattcgtgcactggataacccagacgatactctttatcttccagattacaacacacctgttatattgccggggcatgctatctcaaatatggatcgagatatcaagaaggaggatctacacaaccttggagcgacaaggccatggaatggttctgtctaatattccaggactttaaaagggagcctcaaacaggattcgaggtagaaaacagaaatgaaaagagacaatgaggaattttgtatgtgctcggtcatcacattggctaccacctaactgcattcatgctctaggtgtcgttgaatttgcaggggaagggggtggggacacatttatttgctggaattacgatgctcccagatacttccctgtatgttacttacccagtttcgctacaatactcggatcctagtacactgtatgctcaatgtctttaagagcctgttagcttttgatctattggtatttttgattccggtgattttaattctattacaattacgaaatatattaaacagatcactctctagaacactctcatgatgtaccatgatatgaatttcacaggcctcttatgagtcatgaccataccttaagcttcccctactgcagtagagcctaattacaatgaaaagatagaagaaaaaagaaaaccggaacccggcggttggccttaccccctcgcgttaaaatcgagatcctaattgggtagccttggcgctctgaattattgtattacctaagcaaaagaatccgatgatcgctcggcccgggttccgaaaataagtccctactaggatgcgttaacatctgagacgtatagtctaccaggcaaacagctatctgctgactcctgcaggacgtttggccagaactccaaatcacagtgctcagctgtaaggtgtttatggatatttgcgggccaattttcagtatgtctgtcatagttcttgaagagtagaaaataaattatctcaaatagaaaagagtacaagctaaaaatcgctagagcgagctacagtacaacttatcattctagcaatgatagatatcagtcattccatcccctaatcttctataaagcctcacaagtctctcctattcactcacccagcgtagccttcatctgccgactccattcatccctcttgattcgcagaagaatcaacggaacgccacttagcaaacagaataaacaaattgcattaaacgaccaacccgtgccaatcgcattgaacagcggctgtgcaatgaccgcgcttacacatgacagactgtttcgcacgaggttattcaccgcgacgccgatgaaggaattcttcggtgtaaattctgtcagcatcgtcatggtgaaattggtgagaatcattccgccgagcccgtaaaagaagtttccgaggagctattatacagtagattagtccctgcttgaagctggaaggggaaggaagcgatagaatgaatgaacttaccgggaccaaccagaagtcgtgcttatcggccgtccatccccaccacaatagtgctccggggaagagaacacccgcaaggagacagttctcgcccagacgatcgaccgggtggaggatcaactcccccttatcattgtatcggccctcctttcgagcggtccgcgtcatgatataatcctaccagcggccgccaacgatagcaccgaaaagtaggcccaggccacccgggatatatgccacgccgacaaggatcgagctccaggagtatggtagaaaggcgaaggtgtcttcgatggaaacgcatatgaggtaatacgtagcgaagacaatgctagtgtaatagaccgtaataagaatgggagggtattgaaggagcttggtggcttccatgggctttaagaggaagtagagggctttcttgccggggctaatggcgtcgtttcggtgcttgtcgcggttctcctcgaggttggtggccatctccgggataaataataccatcactgcaaacactgcccagttatagatagccataaaccactgcgtgctgcgccaactccaacgcatggtgagcgccccgccgataatgggagcaagcatgggccccagcatgggaccaagcataaaagcgcccatagccttgccgtgctcttgcgtttcgaaaatgtcagaaatgttaccggcgctgactgcttgaatggaagcgctggaggcattcgcaaggagtcgcatggcaataaacatgccgatgttggggctgatagcggcgagaatgccgaagattccaagaaataagaagaatagtatgtatactagtcgacgaccatagagctcggctaggtatgaccaccacaagggggtgatggcgacagagagtgaaccaaaagcgatagacaagttcaccacagacacggtagtgtgcatatccttggcaatctctatcaggcaggctgtttgaaatcgaatatatcagtttcttgttctggctggggaaaatgatgacttatgaaaaagaacaccactactcagcggaaccaccaaccctcccatcgccacaataaaggtcaaagcccacttcatccccggggtataatgcgtgggactctgcaaggctgggacaaaacataaccactggaaagattccctgcaaacgtgttgcgagctattagtactgatttcttgtctgattccgagttctgccttggtaacatcttgcgtgggctcattgagcgaatctgttcgctcgtcctctggcgttgtttctgtgattgctggggattgcatcatgttcaatgctgctggagactcggcgctactgcatttatgtgcgagggacatgttggtcgctcgatactgaatgctcctgctgataagtcctcttggaggtatataaaattatcaaatccatggatccacctcggccgaggtgtggggcctcccgcttcgtacgaggctccacccgtggactgggcaaatatggagtaaccttatttaactgaggtacccctacctcggtaaaagaagtactaaaggcccaagaaaatctccgaagtggcatggagacaggaagagactgtctacgggatctgggctaaaacggccaaaaatctgcaatcccaacgagattacttggattttaagtgatttctcaaatccaaggccattgattgaatacttaccctcttatcgcagtatcggacgaggtcgtccagattcctctcaaattcgctggcaagagtctgagcagtgctcaataggctttgtagctccactaatgcttcagccgcatccacaggactgctgatgcgcaatttctttcgcgaagcatgtgtcacctgaataatacgcctgtaatattgaactgtggtgatccgcaggagatagatggtcatatcggtgaatttgggggcatccgagagcccggatgagggttccactccttcgatgagatcgacctcatccaggctgaggggtcgacgcgtatcgaagtccgactcatggattgaaggcgcaaaaccctgatcttcagccgcgcggaaatccaagtaacagatctgtgcccacaagcgacgatgcagctccacctgtacgacgtccatcgtccccagcagtagagctaaggggtcccggtgaagtccgtggaccgtcgctatccgaatggccagcccagtcaacggccatatcttccccatgtcatcttgaaccagtgtatcttcttgcgatcgcagctgtacgggcaaaggcgcctgactatgactggggacccaaaagagcaccgcctggtcagcgcatatcaccctctgttgccctcgaagttgcgttctcggaatcagatgcaaaattgaattccgacgtccggttttggctgaaccccgatgatggcaatgcgaagggatgcctaaccctcaccatcgagcgctctcgaccggaaattagaatcgaaaactgggagaagaaagagaacaggtgccatcgctcccaagtaacctgggttaccagaaaaggaacccggacgcacgtcacccaccatccgctcatcatcccctttgaaagtctatttctgcgccagtcaagtcggcccgaggagaaggatttagcgatcccagaacagcgactgcagataatcgcggagacgatttgggaagtccagggttggtagatttggttcgctctctttctttctttcttaagtaatactattggtccgggatcatacgaaagaggcttgatagaagaacaataatatgaaggctgagatcttatctgaacatgaattgtctttcaactatttcaaattctctactagcctgagtggcactcaggctttgacgatatcgaatccctcttcccagttatctagggctgcccgaatctccctgacataagcggggataccagcagagtagcacactggctcagaaaccttgccagggatgctaccacccatgtatgtcgactgtgttgtggggaagagagtcctgtcattgagctccacaacatgagtcttccacttatccgcagcctcaatcttgggattgatatacttgacaccgttgccctcgatcttggcaatggcgtcggaaatccaccggccctgcaccgcgaccgacgtggggccattgctcagaagcgtcggaccatgtgcgccatagatgtggaacatattggggtagccgctgacagtagtaccgaggtaggtcttcgcgcctggaatccattccttctcgagctcggcaccattgatgctcttcaggccgagctgggtcatgacaccggtaacaacatcctgtgactattagcgcgtgctgtctcatgagtgtatcaagaagaacttacaaatccagtcgcgacagcaacgacatcaagttcatggtgagttccgtcctcaagggtgatgcccgtctcggtaaactccttgatcgggttatttccgatgttaaccaggtgcaccgactcccgattgaactgctcgtagtagtctctttcaagacacggccgcttgataccgaagtaatgcggcatcttcagtggcgcaagcaaatccctcgcaacggggtcaccgatacgatcacgggtcttcttcacccagaaattgtacgactccttgttggcctcggcattgaacaagttatccttgtacacaccaacccaaaagcggaagccaccttccttccagacgctctcgaagaaggcctcgcgctcctcgggtgtgtcatcgaaggtgttgcgctcgtaccaatcatacaggaagcccgcaaagctggtctcgcggtaccggaacagctctggatagtttggcttgaggcgttcctgctcctcaacagtgaggtctcgcttgcgcatggggacggcgaggttaggggtgcgttgaaagactttgaggtcgccggcctcagggccccaagcctgcgtgatttgcactcccgaggcaccggtgccgatgacagcagcgcgcttgttcttcacctcgattttctcctcgggccagaaggaagaatggtgcacgatacccttgaatttatccatgccaggccacgggggaatgtaacgcttggcggcctaagtggttcattagtaggtcttgatttgactgatgggtgtaattgctcacaaagccggttccaaggacgagatacttggccttggtcgtgcgaccatcggcagtcttgatattccatttgccctcctttgtatcgaactgagctccaatcacgacggtgttgaaagagcagtccttcttgataccaactactttatccacgtgatcgaagtaatcacgcaggttttggtagttggggtagttgttgggccaattccacgtgttgtagacctcgggccaagagaactcgtactcggggacttcagagtcgacaccggcgccggggtagcaattccatcgccaggtgccacccatgtcgttgccggcctcgaaaatgaccgtcttcagaccgcgatcgcgaagggtcttgagcatgaaaacaccggctatctcgttagctaatgaatagatgaaccgtttactgtcaacttaccaaaaccagcaccgacgaccaaagcatcgacctcgagattgtccgcatatggcccagtcttgtcggtgtgaacagtcgagtagtccgtgagctcagtgttatacttcttcggcttggaggccgtctcctctttgctggccatgattggaatgacaaagtgttgtagttgtaactgaataagaagattgattgttggaatgtatgaagccttctaccccggacgcctcctcctacttatacatagcttcgttcacgccttactgctgatgttagcatatgttgtcaacattggaacaatatcatcacatagtcccatgacgcggagtacaggtaaccgcaatgcacccctccttcatgcgtccgcgtggcagacttttggggccaccgggacaatcctttttgtccaccaatttggtctcagaattaatacatcatgagttggaatctggcctctcaagagctccttgtcatggtggccacaaaaaactgctgtacaccacgtcacattagggctatcctcaacttgtcatcgtaaaatatactgcagctgtgattggtccccaccgaccgggaattgcggatccggaactgagacaaccctccagggttgagagcttccccgcattcggctccgcaatgcggttccgcaaagtatagtctccaaggttcgtattgccccggaattaagcgaactcctcggtaccacggggtaatgggaaagcgatcttccgcttgtttcgaactgttaaataagtcagtcccgcggtctccgccctgtgtttatcttaaatccgaactctcgtcaacaaacacatttcccccccacaatttccccacaatcgcctatccttccctacacaaacatcaacaacatgtctctaaatgcacaggtgcaatcgcatctccgcgatattgtagacaaagcttgtgaagaccaaaagtccggcattcctgggactacggtcgtggtcgttggcaaagatggcaacgaacttttcgctcactccgcgggtaagcgaggcgcgggatccgaagaccctatgaccctcgataccattttctggattgcatcttgtactaaggtggtggttggtcttgcttgcatgcaactggttgagcaaggaattctcaagctggatgatgcggagcagacagagggtctttgccctgaattgaagagtctcaaggttctgctgccagacggtagttttgaggaaaagaagaatgggatcaccctgcgcatgctcttatctcatactgctggattcggctatacctttttcaatgagagactgagacagtggtcgtacccgatcggcgcggatgagttctctgggcggattgaagatatgaagatgcctctgctattccagcccggtgaaggttggcaatatggtgtaagtatgatctttcggaatcacgaaacgcattgctaatgagtacaggttggtatcgactgggcgggaatcgcactggaacgcgcaactggcctgacgctcaacgaatacctacaaaagaacatcttcctgccccttggaattaagaacatgtccatgatcccaagccatgacatgcgtcagaagctggcatacatgaatcaacgaaacccagatgggactctgaggccccgagaccatcctcttcgggcgcctctagtggttgatctggagaacaaggctgaagtcgccagggtgttcaatagcggtggtgcgggtatatttgcaaagccacaggattactgcagtaagtcgcgggtagcttcgatcccaagaaaccacacactaacttatctccgcagaggtcctcgctgtgctgttgaatgatggaacgtgccctaaaacgggcagcaagttgcttcgcaaggagaccgtcgacgaaatgttctctaaccagatccctcagttccccaactacagccgtcaaagcatcccagatgcaaagccggacctgaccaaccccgttcctgaactgtacccagttgctgggaacccaccacagggttggggcctcactttcatgctgagcaacggcggtccaacagggcggtcgactagcacagggcactgggctgggctcccgaatttgtggtggtgggcggacagggagaagggagttgcggggattgtttgtacacagattctgccatttgtggaccttaatgtgcttgggctatggggaacagttgaggctgagatatacaaagccctcggtaaggcttgatgtgggagacattgttttttatttaccagccttcacatgtttcaggagggatacaggtaatttacccagaggtcatgtgaccgggatgttctgaagatgttcaccggtgtatatttgtaattagtcagcatgtcacgggtccagttgaaattctccattttgtcagccgctgattggtgcatattaatttaattcctatcagattcagctagcccgagttgtggagagtaatatattttccttctcctctcctatgtgtcatttacttgcaaaaattcctgtagtcaacccatgagttattctcatcactttcagataaaaacagacaataccattcagcattcatggatgtacggcggactaagggaaatccggggaatgcggggtcgaacgccccagaaaatagaaaaaaaccctaaatatgaagatccgttgcaatgcaggtttacgtggttcgttccccgctttttgacgacatctcagattctcacagcccctgggcaaaacgagaaagaaggaatagaaatcaaccacagcggtcgatatgtccgtccagaaacgaagcacgacacttgcacaaggatccagatccaggcgtcagtaccgctcttgcgaccaatgcagaaaatccaagcgagcatgcgatgcaccatgcctggatccgactagacgaacagtggttaacaattttgacggccagcgatcaccttgttcctactgtgtcagaacaaataaacgctgtactatggaatgggcccgatcacagactcagtctgcgctgagaacgcctcgccaatctcattctgggtatgggagtcgagatcttctcttcccatggaaatcaaatgagctccagattgaaaccggacctggaacatggagcaatttactcgatccaaattatacgcgggaggttatggattgggactcggagtcagcaaacgtggatttgtctgggtcgttggtcgattgtacttcaacgctgttcagttccatgctcaacgagcccgagacctcccaggaaaatgttcaggcggagattcctgacgcattgatgcctgcacggtctgtgtctgatctcattccaccatacttccctatttccccaaacacctccatgcaaccaccctcggatctcgaacttgatccaatgtatcaacagatgtggctggcctcccaggcttctcagacatatagtagcctcggatccgccccatcccaaagcccgcggcgaccgagtgactccgcttggatgtctgccaaccagcaatcctccgactggcccagcccgcaaagctcactctctccgttttccatcgaccaacaaatgattaacacatccaactcccatttaacttcagtcaacctgctgcaaatatatcacgatgtgctagagcataacctgtcgtgttggctaagcgatatgacttgtccctaccaacttggctcacgaaatacccctcagcttgtacccgaattgggatattcacggtctaatatgatataccagcgcacgatcaggctcgatcgcgtcgcacaatcttccaatcttctccagctgacacgcgccgaggaccaggccgcctccaaagctttgcaccttgcaatcatggcatttgctacgcagtgggcacagggcagttaccgacaccgcgagaaatatccgaccaggtgtctcgacggtggagaggacgaaatcgccaatggcgtcgccgacgagttcgatcgcattcttcagaaccacttttgggagcaggcgcagcgcgcgctccaacaagtcgccggtttggagtcgtatagagttacatgggccgagctgatcttcggcttcacacaaaggccgtggaatcccgacactcggccttctagacagcggatgcaagaacaaggctccgagtttgccaccgaatccgtcttgacaaagttacacgatataatacacaaagatggaccaccagtatacatggagagagcagctcggaaaatgcacgccttgaaatttcgctgcgacgtgctcgaaaagggcctcggcaagccgtacggcagtcgcaagaaagggacccatggcattgaagccatgagtgcggaagagcgagggacaattggcctgctctactggatggctatcatgtgtgacaccctctcgtcgtctataaacgaacgacccgtcgtggtgctggatcaggactgcgagcacgaacggcaaaaagagatccagcaagcagggaatatcgacaaatctatcggaagaagtcgatggaatctcgatatctttttgcaaggaaacctcaagcagatgcgccgaacgcactggccctgttcctatgaggctgcagctgaagacgtgatcaagtcagcgccagtcaaggttcttctattccgccacctgtcttacctacaaaacgcggttcgcaagagtgttcctgaagagcagatcgaggacattgtccgcatggcgatgttgttatatgaatactggaatagaacgcatggcgccttcttcgatgaactagtgcagaactaccatgcggttccgcagcgcatacggggctggttcctctgtatctctgcgcactggaaccttgctgctcttatgtttgccgacctgctagaatttatcgacgagaattccctaggcgtggatggtgcaactcgtatcaccggtcaagtggcgaggagaattaggatgcacagcgccagggaactatcaattctggcaagggtcggtacgccgtctaccagaaatagtgataacctttgtgtgccgcagatgtcagacttccaccacgctgtcaaggagagcacgcttttgaccgagccatggacgatagttttaatcagagcatttaccaaagcttctatggtctttctaggtgaagcagatgagtccttgcggtacgacggaattattctcgggcagagcagtcatgatttcgaggggaatatggagcaggccgaggattgtatgaaggggctgtggctactaggtaaaaagtcggatatggcacgggagattgccgagatcctttcactagcgttgagagaattgcggaagaggtgtgttatatagcttccacaattctgcaatcaacttcatattcactaatggacgcattttacagtaaggtggccgctcttttaccggttgggttgtcatagtagacgattgcggtgaatgatactaagggactaatgattgacgggcactacgtctataaataagcctctgttctgtatcgcgggagtattatcaaagtacgagatctcccttgatttggaaacaagcacctgcgattataaacctttaattggggtattctaggtgaggttcatatattacagttcgctaaattactatgatacatccatctcgatatcaaaatatgtgttaaatgccccaagaggtcaacgattgagttgctcctgtctttcacagtctgggccttcaagaagactttgggcagagtcgcccattgttgttccacgagtaaggcaccgggtcaagagtctgaacctcccagtcctcagcaccaacggcagtcagggcaaagaaaagacccgtaggatcatacttctgcttgagcgcatagagacgagggtagttaacaccgtaaaaggcatcctggagattcggctcgacaagatcggcctcgctcatgtaggcacctgagtctggggcaatttcacgtagaacgtccatccactcagtcacgaagcgcgatgagctctccaccacatcccaggaggaggtgaagttccattcggaaccgacaataacgtgtgagagggcatcgcgccatgcagggagcacggcattgtctgtggggggctcagcggcaatgccggtgccgctgatgtggaagccggcaatgaagagaccctataacatgtcagaaattatttcaaaaggggagagattatgcatttgtgtatgcatatatgacatacctgggtgatagcatccttgtaggcggcccaggtttgattgcggagatcatcgctctggaaaacgctgcgggggagcaggcgagaggcagtcttcacgacatcggttccaacgtattcctgagggaaggccacggcccaggcatcatggctggaagaaagttttagctgggatgtagatgcacagattttgcaaggaacggggagaactcagacgtacaagttatccgcgtggttgtaccacggagtgaaggagatattaaggcttttgagggtatcaaaccatggagccaggagtgcctccgtctgggcaacagtcatgttgggtgcgacgaaggattccatacggaaataatagtcaggatcaccggcatacgtcgtaccaatcaaagcatcggaagcaccgatatagaagtaaccgtaggtgccagcatcaacaaaagtctcaaaattgtcgaggtaggactgaatagcagcccagaaagcgtccggaccaggagtgtcgctgattgtgaaattgaaggtcacagtagtcgtctgcagctgaggtagggccttgactgtaagagaggtgacgactccaatggtactaccaccaccaccgcgaagcatccagaagacttccgagttctcagtggaggtggcagtgataaatcttccatctgccagaacaactaaacagagttaatagggagattctttgcacaaatttctcatagaaaaagagacttaccttgcatagccagaacctgatcggccgccagaccgtacatactggaaaggggagagtggccaccaccagcaacgtagccaccgcccaaaccgacagtgacagcttctccgccaacaaccgagtggccgagggtcttagcaaactcataagcctcatggacttggataccggagccaaacttaatggccggaccaacatagccattggcagccttaaagttcgggagatactccttgtccttgaggtggtgggtccaaatggagagagcacccttgccggaggacttgccattgaaatcatgtccagtattcttgaccactagtcgcaagttcaagttacgggcaaagttgaccgctagctggatctgagccacggtggatacgttcactgcatacgtcggatatgcgccctgcgtgcagctggcagtatagttgaacggtgatggcaggcacgagcggccttggtatagcggcgacatcaccgaggtaggatcttccatatgcaggtccgagctgagccagtcagctgtgacgcttgcgcacttggcggcatcgtactgcggccagtctggatagcagtaggatgccaggggcaccgctttgatcaggctgccgccaagcaagatatcgaagatgtcccaaattggagccaccggccaccaggagtccccgggcattagcttgcagctacgatgagcactcctcttgagtaccgtggagttgctcgcaaatgcgaacatgttagcgaccgtgctattctgcaatgccgccgacacatcagagaggacaccttcggtcaactgcacttcctcattttggaataacgaaggtgccgaattggccgtggccaccaccgtagttgctgcttctgtgagtgatgcggtcgatatcgcctgagcgagcgaagtgctcgcgaggagagtaactccccacatgcccttcatatcggaaatttagcaagacaattccaagaatcaaaaagaaagagagacagaaaagggctaacgagtcaaggcaaacgatatgaccaactccctgctaaaaatgtggacaaaagtgctgcttaaatatatcttctataggggcacgagggacccgagaacgacagagccataagagctttcgcgactatcgggcttgtggcgctatattttgattaaaatatctcggtcaatttattcttttggtgctatagccgatgcgatgaaagccattgtacactaagtgactagttgcataagttagccagctaggcgcaattatttcgcttaccaccgtctagcttcccacaaaacacaaaatcaagaaagtgctctctatttctggggtttctccgatttgattcaaagatactgacatatttggtataaaagcaatgtgttcgttcgtcaaatcagttttctgatacctttagtttaagtgaggccgattttggcccccaatatagttccccagcctaggccctaagtctttacatgaaacttgactaacttgattgcattgaattataatagctcgtaagccatacgctagtctattgcaaggctccacgaccgcaactaggcatataatatagagaagacggcctaattggatcacaattactccgcacccgaggccttactgtgtgctcagtaagcttcacagggataaaagggcgtgcgaaagttactttctcgggcgatgcagtttaatatatgcgagtgagagtttgatgccggttgcagggatgttgcttatacttaatgtaaactggcgcactgcccagctgagtcggattcttcttgtcaaaacaaaaggtgacgggcgctgcttttttgtctacgagatgattactaggcgagattatgggttctaatgataacttgcaatcgcaggccatcggcctgatctttgcctttccgtgcttcgctagtgcagctgtggctctacggctttacagccgcacgttgacgaaatcgtttgccgcaggtcagttcaatgatccaattcctcttcgtttgtgggttccatgaaattaatagagaatagatgactgggttatttgtctcgcgatagtgagtaccgcaaccactctaagaaagtgcccggaggattgacagaggcagatcatgtattgggcagagacatttacgtcttataaaggtaggatatgaacagcaaggatactccagcgcatatataactcatgaagctaatcatctcttagtgatcatttatacatacattggatataacgtctgggatataccgaatgactatcccgccattctcggcagcaaatatacctacgcggtgggtggaatatatcctttctcagcatatttgttcccgcttgctaacgaaatagaccgaactcctctacaatcccattttagccctcgtcaagacctccatcctactcttcctgcttcgtctaaccggccagaaacactcagtacgcctggccatctggggtctcttaattttcaacggtatcgccgccatcactacattctttatcactgttctgcattgcatcccagttgccgctaattgggatgcggcttcatatcccaatgcgaaatgtcttgactttgcaaacttcgtcaccggcacgggctcagtttccattctcacggatatccttgccttaatactacccacctggatcgtatatcgtctgcagatgcaacggagacagaagttgatgctgattggcattctgtccttgggtcttctgtgagtagctcaaccgaacgtcttctttcctcatcaatctgatactaataaataaagaactgtggcggctggcattatacgactcattctccttgatcatttcgaccgtcatatgccggagaattacacgcactcggtcctcttttgtgtgtccactatcgaagttggattatcgtttatcgctgcatgtgctccctcgtttaagccgctcgttacccggctggtcccgaagctcttcggctccagccgcaccggccgggataacnnnnnnnnnnnnnnnnnnnnnnnnnnnnnnnnnnnnnnnnnnnnnnnnnnnnnnnnnnnnnnnnnnnnnnnnnnnnnnnnnnnnnnnnnnnnnnnnnnnnnnnnnnnnnnnnnnnnnnnnnnnnnnnnnnnnnnnnnnnnnnnnnnnnnnctcttcgcccccagccgcaccggccggtataacagctccagtaaccggttgggctacaacctcgaggacacgtcaaacttcacacgccgtacgcacgaccagaccgtcatcgttgaagctggagatggcgagatcggccacagtcacacgaaattgaaagccgataatgcgatcaccatgaccacggaaatggaggttacgtggggtcggtctaattgcgaggagcaggataccagcagtacggagagtcttgtctacggaaaggggagtagcaggcgttcgaaatgagtttggaagaatattgctttatttgttccatagatgtactctggctcgattaaaatatacgactgtaagaatgaagcttcttgagctgtgtaggttgtaatagttgcaaccgaccatcaatacaactggcagaaagggggacataccgctttcatagcgaccgccttcgagcggggtctatctttcgaggccatcccagaaatagtaaacatccatcagtggttttacgcattggataagtttcccatcagaactgagaagcgtctcgtctgagttcgtatcatcgaatcaagagcacaatccagtccctcttctcctcagctcggagttgtttctggtcgggtgtgcaccctggtcgtctgcggaaggagtgctgatccactgtgggtgtgggtcagactccggtctgagaccactctttagatagaggtaggctgtgtgaatataagacccattacctacatatatgtatcatgtatgtagccacaacattgatggaaagaccaagggttgccagcatagtattccaaaagtgctgggcaataatgctgcgctacctaagccataaaagctggagagacctagacaaaaatgcatcatttgatgtcattagtagtaaataacttacctaccaaaatagttaatcttgtgcctgctgctatcataggaacaaatgctgcctgtgtcttgcatgagatggtatctgtgacaaaatagaccagcagcattagctcaggctccaacctgcacctagccagaagtggctttcacagctgccaactcccgccacaaactagtttgcttgtagcaaaaagtacaatgccgcgaggttcaaaccaaccattctcatcatttttacccatgctgaatcaacatggccactctcgaatctctcaagtgtgctcttaggcaaaaggccaccgcaacggggtcatccccgaatcagccattatcagacatccagtacaacgctggcctcgatatcttactgcagggtccaacataccaagacttcatcatccctcagatctctcggctgctcgctcctctcttggactcgaatatccagatatcggtgctagaaataggacccggctcaaagagcgtatttggatatctgtctggtcgtctgaggcggaaaatcaggaaatacactgcattcgagcccaatggcctgcttgctacagggttggaaaaatggctttgctcgaaatcagaggcagagtccccgctgccctgtctggaaagctcgcctgatgtccagcgaattctattcggtgtagagagcgacacgaatagtactgatacgcgtgacaaggacgaaaagtttgatgttatcctatcttgtcacggcatgcatgacatgatgccaaaaaccaggttcatcggacaagcgctagaaatgctggttaagcaacccgaaggaggaatggtggtgatttttcatcgcgacttgaccctacacctcgacggattagcgtgccatcgtaccgcttgttttcctatgggagctgttcgcgtggctaatagtgatgagatactggattcttttgctcctttcatcgcagggtttgccatgcgggatgtggaggcggacaaggatacccgaattgaatggcgtgaggtgtgccgcgccttgggccgctcggaggctcacccagaccatctattattcagctcgcccaatatcatgtcggccttcacccaccatgcgaccgcattgccggagctgacagcacaggtgccattgttggaaggaggcaaagctgttaagaaccgagaggctcgtcttcaccaccccgcctcgactgttaggccgacagaggtacgacaaattcagcagtgtgttaaatgggctctgaagcacggtgctaatttgaccgtcgttggcgggggtcacagcggccactgcctatgtcccaacgtcgtttcggtcgacatgagcgcctttgaacaagtgcatattatcacagccgaggatagtggactagaatctggtcttgattctgttcccttggttgtcgccgaggcgggctgcaaggtaggggatattgtccgcaagaccatggcagccggcatgacagtgcccttaggggcccgcccaagtgtaggcgcggggctatggctacaaggcggcatcgggcacctggctaggatatatgggctcgcgtgtgacgccatcgtcggtgccgtgatggtcagcgtcgactctagccaagccttttgcatcggccgtgtaccaagccaacactggccggccggtgccgtgcgcccagaaaacgaagccgatctgttatgggcgataaaaggcgctggaaccaacttcggtatcgtagtcagcgttactttccaggcttacgcggctccgatgttctcgattcgaaattgggttgtcccgctgagtgacaatctcgaagcgcagggcaggctcagcaattttgataaattagtcgcgaggcttcctcggaactattctatggacgcatatctgtattgggacctcggaaagttgcatcttggcgtgaccatgtttgaatcttccacgaacgggcgcacctctggaacatccatctccacgcccacgccagcagcaacacttttcgagcgggaagacaaatttcaagtcgtggactgcgtcggcttgtttgacgccgatatgtacatgtccggaatgcacagtgggcagaccagcaccaatacatcagcattcaagcgatgtttattcttaaaaagtattggcgtaatgaatgtcgccaaaatattgctggcagccgttgagactcgccccacgccactgtgctatctccatctgctacaaggtggcggagctatcagtgacgtggcggccgatgcgactgctttcggttgtcgagactgggactttgcctgcgtgatcactggcgtctggccacgcgaccaagatggaaccgaagtcgcacaagccgccgtacggtgggtatataaggtcgctagcgacttgttgcccacgagtagcggagtttacggcgcagacctggggccggaccctagagacgccgcgctggcggccaaggcttttggatcgaaccggccacgcctggctcgcctcaagcgcagctcggatccgcataatgtgctagcttacacctgcccgcttcctaaagcgcccatagaacataagcttgtcattctagtcacaggtgtaagcggcgccggtaaggattattgcgccgacatctgggtctcggtattccttgaacacacccagaaaatgattatggcgcgcgcagtcagcattagcgatgcgaccaagcgagaatacgcggcggccactggtgccgacttcaaccgcctgcttcaagaccgtggctataaagaggaacatcggccagcgttgacagcgttcttccagaaccaagtgcgacatcgacctcggttgccagaggagcattttctaaatgtggtaaacggtgccggagacgtacatgtgctgctaatcaccggaatgagagatgaggcgccagttgcagccttctcgcctttggtgccaggcagcagactgctcgaggtccgggtgaacagtagcaaagcggcacggcttgcccgccgaggctgccatggcggtgattctgatcatggtgacaaagagaatggcagccgccctggcctcgtcttcaataatgacgcgaccggaaacgacgcggccagaaggtttgccgaagaatacctgattcgcttcatcgatggagacctccagcgactagccaacatggtgcgtccagtacctgactttccacgcccgggcgttgaattccgccatgtgctcaacatctgccagcagccgggtgggctagccctgtgcacctctctgctacagactcacttcactggtgaatgggccaaggttgacgtgatagtgagttgtgagaccggcggcttcatctatgcgtcggcgttggcctcgcgggttgatgtgcctttggtgctgattcgggaagcagggaaactgccgccacccaccgtttccgtcctcaagtctacttcgcatatctcttcgacatccagttcaaatgagaataggattgagatagaacaggatttgatccctagaggtgcttcggtagtggttgtggatgatgtgctctccacggggaatacactctgtgcggtgctacagctcctaggtgaagttggcatcgctgatgtcagcgttatggtcgtggctgagttccctgttcatcgcggtcgggaagggttgcgccagcgtggatttggcgtcaatgtccaaagccttttggtgtttgacggcgcctaggaaaggcgagaatgttggaatgtggaatgcagattgttcttctgctaattgaattttgctaaatttgctagtttgatctacaacatcctaatcgtcttattctctcgatgccttgacaagtcaattgacataatttctatctaatcactggtagatcatcgttggaatagtgcgtaatatgtgaatgttgtggttgtgctccaactgtttaccacgggggtcgtgagctaccatctccgtgactccgctactccgcagttgatcagcatcttcaacaactcaaccatgtacgactcctatcgtcagtatttccatcatgctcacttgtatatatgcaaatagctaacactgttctaggtccccaccctctccttgcccaggtcccactgaccgtttcacccttcatcaacctccccacctccgtcacattaccctacacgtacaaatctgttccctcgtctctacccccgtcagtgacaatcgatccaaacagcccggatggtaaggcccggtatgtcgtctccccaagcggtgagcacgcagctcatccagacgatgtcctcgccgcatgccactccctcgaacaacatttgaatcaggctcgcgccaacgcggagcaagcgatcaacacatggaaagaggctataaaacaacgcgagctagcggaaaagagacgcctcgctcctgggtggctcgaccgcgaggaaaagctccttcagcctagccggaccaatacctcccctgacgcaaatggcgatgcccctacaagccttttggatagttcttcccctgaccagggctcttcgcagttaccgactatggttccgcacaacgatggggaggagctagatagggcgttcggtggtctaggtgtgaaatgaggaaggatggtcttgcaagagagttaatccctcattgctctttacatcacaggagtgcttgggaaccgaattctcaatgtggcacagtggatcactctctaaaataatgtctctatacactatgtttcgggcggacttccagcgctgggctcttcgaaggccttgtcaaacagtttataatctcccaagtccgcgacatgcgcttcgccgtggtgctagcgggactttgactgtcagtgctaagattatgttgtgctagaagagtcgagtggatagggtgaatgatttcacaattgttcctttgactagctacctatggactatcatctggaggcagttattgctatgaaaatatggtatatcatgtattcaggatctggcaataatgctgcatataagattcctatatgcgaatgatcaaatacaactgtgtgtttaacaaaagtgcttctgacgctggttatatatatctaccaggtgagttcctatttcttgctttttctttcttatgccgatcatcttgaataagtactcttcttaagatcttgctcgtcacaatagcatctatattaagatgaacttggtatctgtatctcgtctacgccttcacgccctcggtttacttcctgcgataagggtgacttatctttatcaggagttaccatagtaactgtatacaccgtatatttgttaaattatatagacaaattggcagaaaggctagtgagtgtgctgatccacgcggtgtctggcaacaatcccaactgcggctcataagctcgcggaaaagctccaccccgcgcgccggaagctctttttcattccatcatctcgtcatatcattcaatcaattttctccctctttacaattaaacacagactccaacatggaggtcattcgcagctcccccgaagcctcctccttcgtgccactggctgaacaccagtcgcgcaccccgagctccttctactccggacccccagtattgtactaccacagccagcgctgcaagatcgtcattctcgagcgcgagctactcgccgccccagcactgaatgccctgcgcggccaggaagctaccaacaacgccgccctaagccatgaccagcaggacggcgacgagaaggagatcgcaatctcaggcgtggatacctgggtaacatccgagtgagtttagtctattaattttccctcccatccgaaaaccaggacaccaactgactaattccatcacccaacagcaagttcctgctcttctcccccgcagcatcaacgggcgtgtcgatcccctacccctcgatctccctgcatgcactccaacgcctacgcgtcccagactccgatgccgaagtccagggcctgtacatgcaggtcgcgacgccggatgcgggtgcgccctctgccgacgacgaagaggaatgtctcacaatgacagtggtgctgcccgccgacgccgcgctagcagagcccgtggagcgggagacggacacacccacgcagcagctttacgacgctgtctcggcgtgctccaacctacacccggatcctcttgaccagggcgacgaggatgatggggatgggcctcggttcgtttcggcggaggagcacgatggtgtcttccagcttggaaatggtggtttgcctccgcctgttgatggcagctctgggtggatcactgcggacaatatggatcagttctttgatgcagatgggaattggattgctgctggtgagccgccttctttcccgcttgggcctggcgctgggactgttcgggctcgggagggcgagaatggagtcgaagagaatggtgttgaggatgagacgaagtggcgcaagacggattgattgtgatcagactgttttaaggaagatatgagataccgcaggattggcgttcaaattacttgagtagttacatagtaggctaccaattcattttactaagggtcattattccaaggatacattcgtacatagggaagggttggattggatttctactaataatttcgtctttctttcatgaatattaacctcataaaacacacaccaaacataaagacagaagaaaagggcagaacatgaggcgacaagcaaaataagaagtaatagaacaaataaaaacaggtagaagaaaatgaccccgaagcttttgcgccagtatcaggtactgcacagtaaaaagaaatcaaaacaaatcaaaagaaaactgtcgctttcaaagtccacaaaagacagcaggattaatctattcccgtaggaatccatcgccatcgtaaaggctagcaggtgtggcagttccaattcccagtccgagccctttaccagtaggagtagtcatgcctcggcggggagaagtaggagtggggggtgtatggtggctcgacatgtgaggcggtagttgttggttggttggcatggaacggggtgcaccgttcttgccacgggtaggggaggagttaggcgtgcggaacgacccaattgggggctgcatgggggttcgaggataggaggtgggctggttagaatcctcaaagatagtgacgtggtcttggaccattgaggaccggcgggggccgtagaatggagaagcaccaataggacccagcccgtcatccaggcgagatattgaagcacgatcttggcggaatgcgcgatccggagaaccgttgctcatgcgttggtgtgagtctgtggatctccgccagtcactaccttctgttcctgtgatactcatgacgaaagggaggcggctgggagaggccaaggggctgtctagcgtatgatgggaggatgctaaggaaatgcaagttgactgccttcgagctggactgacgccgggttggttccgaggcccctttactgctgaccgtcgtgggctgccaatgccaagagagttttcgtggtatggctcggggagctcccatacagggggcactctttcgggagagggagtgttggtgagagaggtgccgtgagacgaagggagagatgtgaacagttcagggagagcgcgagtgtttgcgaatggagacttattggccatggaagatgaaacacggtttctcttcttgcaaggactgtcatcgtacattggacgctgcggctcctcgaccagtggcccgagggagcctagactgggcttgccatgtcgactgccgtacttgctgcgccttgaagaggacagaggggatgctgcacttggtggcaacgaatgcatgggttttgttggggtgttgattgagatctcacggagatccagctcctccatcttgtcgaagtcttctggttcctcttcgacagtgggagaaaacgtcgatgacccaaatgtcatgggtggatggatagagatacggacacagttttgacgtcggtgacctttgcgttgtggatttccacccttgagtgcagagggaagattgccctttagagagagactggtacgctgcatcggacttggtggcttggtgttgcctggtgatctcacctgatggaacaaagtcccgcccccgggtgagccaacgtagaaggggtcattatccatttcgaaattatcgtagccgatgctgtttcggaactgattgccgtatgggacagaggatatgtgggagcccgatgatcgccaggacgagactgaattttgatgtcccaaacgcccaaccgtcccagaccgcaaggaagcatgtcttgaagggggatgaaatgaagacatagagtcagtccgacgtggagcaccaccaaaacggtcgatggaggcgcccgagtggtgagtcgtcaaacttcgtcgaggtgacgggcacacagatttatggcgaggttcagttgtcgaagaggagcggatagggaagttgtgcataggcgggatggaggtgtttgtggcaataaagctcctccggccatccttaaccccaacgtcggcagcactgaaaggtacaaacgtgccagagggcaatacgggtgaggtctgatcggtgtcagccgacctagaaccagttctgccgtcatccaaaattgagctattggtggtatccagactcatagaggaaagtctcatcacagagtcattcctagcatagctgaatctgtctggagggtatgcagttggtggaggaggaggtaccgggtgaccaggcatcatcccggcagtttgactagcaatacttcccccgcgaacacgactaggagaatcttcaatgttgtttgaattcaacatgccagacgagttacggtcttttgaaacaggaaatagacctgactgctctcgtactggagggggtttcacacctagatggaacccagcttcatcctcgttgagatctggcgtttgtgttggggttctttctgctggcaattccagaatcccttcgaccgccgaaagtgggacgtcttctttcgatattgatattgatgctttaggtggtgggctcggaagatcgttcgattcactcaatgtggccaacgagctcatgcgtttgtgagacaatcgtgataggcgcttggaacgagatcgagaaagggaattgcggaaagatcgtgctttctcggtgaccggtaaagaagattccgagtcatttttcagacgaagcaaactttctctcgacgttaattgtccccattccgacggtttaccatatggaagctgcccatgtgcccttaagacgcttccctctgcccggctcagttcagtcaaggtatccacctggcaagattgcaagcgactgcgtggtctctgcgtaaagcccaccagtcgtattgcatggcgctccttgcgatacctgacccagacaacaacgctgaccactgaaacggcaatgaagacggccgcactacaagcggctatcgcaatgacggcgggcagcgccagcatgctcgcctgctaaagtgtaactgggctgattccgatgctgtatggacacaataagggggtgtggtctttagaattcctcatccgtgaatagaggattggtcgtcaacatgcgatgtcgcgaagtatcgctatatcaaaacggccacaacgaggcttcacagactcctcatggaacacaacaaagtctcacaggaataagaaacaacgaagtttactggcattccatcaagggagcgccaattgttatgggaacattgattctagccgaggaatgctaattcatcaccaccgggtgcaaagaatgttggcggccacactacccccttcgaccatgtttcaacatggacagcgccacgaatataatcatgccagtagggcatctgaagaccagtatttggtggtgggaatgtatttctaatgcctccaaccctggtttatacttgacaagaacttatcgctcttccaagtaccctcttcctaccttttctttgacatctctgttcgatggaatctagggtgccttttcagacatatttgtcataactacagagtagataaatggctcacgcacccatgaaagtgttcaaccatgacgcgttccactggtcgcctttgacgatatttacgaccaaccaacaatatcagtgcgcccttggtcaacgctattattgttcggataagtgatctattttgattccgaccgagtggcttcggcagtcccggattatatatattaatggtataccggttggattgtagagtgatcatgcattggataatcaccccgtggacaaatggccaggttcagttggttcctactgatagcagagcttcgaatcttcacagtttccaatcattgccagaaaagctagttcaagcatctgtactccgtactcctgtccgcgatcgggagtcggaatggaggacctcggcatcttggccattccccagaagaagggtcaagtcagtaatatttaagagattgatcttctatagctggaacgatatgtttcgatgcgattccaattgtatatctctaggggaagtgcagagtggagatcccacgtcgcatttccccgccggatatgcccaggtgggaatagcctctccaatctttaatagacctgaccgtgttgaacaggtctacctaacagcagagagttatgatagatcccattatatcctgtcaaatgacgactctgaatagtgtcattatccactatgtacaggaactagcgccattgaggcacaatgcgaggatccccaccaaggtctatacatagtagtgaatagccccgccagcacgtcgctcaccgtgtatcagttagggattccttgatttgcccctcacaggctctctatttaagtgctcccccgagcttgctattttccccttcccttttctcatcttctctctatctactcttcgtttgctacaatggctgctaaccctgtgactaaaaatggactctttgtccacaacaataccactgctcctgagcattccaacctcatgggcatgttctctctcaagggaaagactgccattgttaccggtgctggcgctggtatcggtctagccgttgctcagggtctggccgaggccggtgcaaatgtggccctgtggtataatagcaaccctaagtgcattgaaagggctgccgagatcgccgagcagtacggtgttcagagcgcgtagaatttccgcaatgtgattggttttatatcattctaacaagatttattttgcagccaaggcttatcaggttcaggttaccgacgcaaaggctgtcgagaacgccgtgaacgacgttgtcaaagaattcaatggccgtctcgacgtttttattgctaacgccggtattccatggactcagggccccatggtcgacggtcccctcacccactaccgcgatgtaatctccactgatctcgacggtactttttactgtgccagggccgccgctgagcactggcgccgccagaaggaagaaggaaccgatgccaacggtaacaaactcaccaacttcacatacggcagcttcgttgctactgcctctatgagcggtcatatcgtcaacttcccccagatgcaggctgcctataatgccgctaaggttgcggtcattcatctttgtaagttgttattcagactagatgggctccgtcgctctactaacgcctttccaggcaagtctcttgctgtcgaatgggtccgctttgctcgcgccaactccgtatcccccggttacattgcgactgagatctccaactttgtggctgaagacaccaagaatatctggcgcgataagatcccgatgggccgtgaaggccaagcccaggaactgaagggtgcctacctctaccttgcctccgatgcttccagctacaccaccggtgccgatatcatcgttgacgggggctactgcgcaccttaaacccgaattaaaagcagggtctttcgtatgaagcatgaattttggacagcgatttgatttgaatgtgatgatagacgaacgtaacgatgaacagtttagatggacgagtctgaatcaaaatattttatttgcaacatccccctcatcatgtctagaatgactcgcccggtaaaatggtgccagcgatgccagatcccgacggatgcattttcccatcaccggcacgaccagtccatttctgcttgtgcgcgattgccgagccaatgacgctatgagactatgccgtccttgtgggaataatggctcaatccctgcatggcgttgattaaccccaccaatgtcatctggaatgcgctctacccccgcgtgacagcgctcatacaacatagaccgatatgaccctgtcggttgctctgatcaaaacacctacgagctacgaaataaacagcaacatgaatgtaactatcaccaggggtaaaataactcttctttcttaaacatcaacttcaattacgacacaggaaagtagtatcatcgctccgctcatcatgcgctcggacattccgccaagcctttggatgctgtacggagtatctgtcctgcaaagcctcatatgctcactagccccttattcgtcaagctcgggagtaacataggcgaagattccctgggatgtccactcgacaacctcatccaaccaaaccaccggtcccccttgttccgggtgctcaacgttaaaatagggacgttcgacttggaattcccagatggggatatcgtcgactgggtagtgttcgtcatcggagtcggaccagtcagagccatactcatcggagtcatactcttcggagccataatcgtcgacagacccggggggtggactgaccgtggagaactgggctctatccgcaaagttggggtgctgcggacggtttgagtctctcaaattgggactgccacttccaatgtcgtcatcgctttctgcgattctattggctgtgtcaagaacattgttttcgccgggtcgatgatggttgcgtgctggagtcgccaggtgaggatgttgttcgtcttcatcgttgggatcggggttgattggctcgtactctgccaaaggtatgcggtcttggtcttgattgacatgattacggttgaagagattgcgtgcaataaattggtacacagggaggatgatgcgacgatggcaggcacctaggtgctgcatgatcgaagcattgtagacggcaacgacgaacaggaatgagagtgtcaggcaaatcgccggaaaggcaagagaagcctctgccatgatgactttgttgattgcagatgtccgtagagccgaacagacgatatggaagatgaaaaatgcatatggatttggggaggaaaaagggaagaagcaccgcgcgacgaaggtcatcaaaatcgacatctaacaactactgtgaattgatgaacaataggctgatgggattttcaaactgccagagaatatctagatatattcaataacaagatttaactattttcattagttgcatctactcttgcatctgcttatctatacaaagtgatatcaataagcaataagatggcaaatccttatactcgatcactgacatcaacatataggtatccaagttacattgcaaaagtatcatagagcaaacttctagtttcacaagtattacttgacccgatgatctcctagagtcacaatattcattcacgatactcagtcacgccgcagcttaattggcgactttcccatatgaccttgcacgcccacacgtcataagcaaatcttgcttatgaatcatataggaaagccagctcgacatttcctatatttagattggtgctacagctctcctatcaacgttagctcaagcataggatacatatctaggtatctcattgtgcagtgagactttcaccattcattgtttactactctactttctttctttggctcaaatcgatgggcttgaaactaagcatctttgtttatcctgatttaaattagaatcatggaatccattgtttcctctcttcctttgtccatgacgttgacacaaaggcctttcatgcattgtataagtgcatgccaaactgcatcatccttccctcccatcttttccacctctcaatcagatcacaaatttctacatatacattactccaatcatcccgttgaccttactaggtgtgttctcatacagccatctacaatgggaattccaacacgaggagataagaaccgaattgttaagcgcaagttcacaccaagaaaaacctggacagaagctgttaaggaaaatattgtacagttcttcatttccaagccactcatatacggtccatttgctgataagtccaagtcgccgcaaagtgccgctctacaggatgcgctccaatgcactcaatgccgagatctgcatattattccatatatgatgagtgcggatattgctgcaggctcgtatatcatatcggaatacccacctttcttcgccagcaaaattgcatcggatgattgtatatctcccctggacacaaacatggcagcccaccaaaataacgatgagacattttgggaagacattaccccaacccagcaacagcgctactacgacaagatcgataccattctcaagaaggcagaggccgagtcaggcaagccaatagatgaagccaccgttcttttcgcccactaccaagtggacttccacatccgccaacactaccttgccccccgaagtattctgaatttatgccgctcaaaggatgatattcgagcgctgacccactggcaatggaagagcgctgtatcagataaaacagcctttgcaggatgccccgactggggcgtgggatgggtgcatgagccgagcaattctataggccagcagattgcagcttggcgtatgggggaacgaaggcgagagaaacatctcgcggaagtgcaggcccggtgggctgagatcagagatgagcgacagaaacagaggacgaggacaataaatattttgttccagggcgcgcatgttaggacttacaagtatgagccatgtggaccgtgtctgacggaggaaaagattgtggacattacaagggaaaggggtgagcattatgaagccttttggaagttatatgacgagtgagggactcattgaatgctattatatacgtattgggttgtttgtttaaagaaaatacaaaatcctttgttcctcctcagtggcgtctttccaagggtcttttttagatggatgttgaagccttttctgggtaattttctgacctttcaattcgtacaataacggccagagaggaatctgaagtcgttttggatatttgttaagtatgtttattttgtctctttcaagtcgaactaagcaagtggcgttctaccaagcaaaaaacaaacaaacaaatagaaaatctatctgaaagacaaggaaggcagtttgaagcgcactcgcccacaatccagggaacgggcgtctccatgccaatgttgttgaccgtctctagagcagacatacccaccaactgcctcacttagcctatatctgaggaacattttcactggcgctgtttcctcgtccgtgaaactccaaagctgcgagtattgtaagactatctcctgaccgtcatccgaggcttgaataatcctccctagcttttcgcccatgaaggacgagactagaacctatacaaatgttagttatcatcaaactgcagagtccgtgaacacccacaggatgaaactggcattcgatgaatggtctatgattcactcgacggatgaaggtggaaacgatggctttcaactcgtgtatagtgattccccgatttgtattggtgggacgaacattagagatacatgtcatgaccagatgtggcttgcgagggcgatcaatgtatcgatattgattcatcactcgccaccattttcgaagcgggtcgtttagactgttcacgaaaggaggatcgccatttttttaatgtgggctatgagttgtcagtttcatcttgaagtgtagaagcatatggaattgcttgcagcctacttacctccaatgttcctgctttctgggaggttcaagaatgaagaaacgggatggcccttaccttggtattgtcatatggcagtcaatgatcttctctgtctgcctggcttgggccaacgcatcattcaccatttcatacctattaatgtcataccgatgcagattcgcaaatgttggagcaacttcaggtgagtagtcaatgtcagaatcattcatgatatcttgtacgctaggaataggagacagtctcagaaattcttcctgttcctgcacgtcaggccggggaggatagagttgaaggagtctatcagggtgaggctgaaagaaggacgggctaaattgaaaagttccgcatttatctggatctaagagcacttcaaatgcttggatgccaagcgcataaaggtattcaggagaagggaagtcaggctcaaagtattcaatgcaccgaaataaagacctgagaaatttatgaggctgaggctgtgcttcggccatgttgacgaagtggagtgaggtgtttaaagaagtaatggaccgaaggaatgatgagagaatgggcggcgtaacattttagaaaccctggaacttacggtagaaggtcttccaatgttgaatgttaaggggattgtaccgccgacccccccttggccgttccgatcccctttggccaattcgaccatcagctatttctgccatttcttgaattttctgcaggtttgaattcttgtttatatagtaaaagatgtacctttctactcacgattttatacttctttcttcaatttgaatgcctaaggtctacaagctgtatgttgaaggccttgaaatataagaagtcactcttaacttactgtgatgcgtcacgtcacgtggtacatcccttgtatatcacgtgcaaagagagaagaataactaagatatagagaagaagtaagtaggaagtgttacgagccaattcgattcagaagaaaagagtgcaattcagaccaaattctaagtacgaagaagaaagggagaaagagaaactatctgagtgtatctgagtgcgcgttcttcccttcttatacccttgcgtttgtcttcgcttaatttcgtccgaccacttaggaaggtacaaggacatagtcgttccttcctcgtttggcaagtacgaaaacgtgaccgttcctgcctcgtttggcaagtacgatccttcccagatcgtcacaggaagtagcctaagtatatagtcgaccctttgcaaaccttgcaaactttgagccttctcgcttagcaatctagcaaatatacaaacagcaataagtcagtaaatatgcaaatcgtcggaaaagcggccaggaagacggtggacgtttatagtaggcggtcagtctatgtacgaattatcaggcaggttggattggccaaaggggggtcggaacggccaaggggggggggggtcgatggtacaatcctatgtctattttgtcctgattaatatggtgggccagggcgttcaacatggttgagggagctctgggaaacccggaatcctcaaatagtggccttgtttttcgagcagggagaaaatctcggagccttcatgtcaggtagaatcctagaggagagaagatagaccatgcaccactcacggaatgaaagggagttttcaagatgctgttacattaggatataaggactctcgtcttgtctgctaggattgactgcccatcgtgcatatccctcttcggtatctatatttctgtctctacggtcaggaagtgcgtcaggccgttcctgccccgtttggcaagtacgatccttcccagatcgtcacaagggccaccagaagccgggccatcagccgtctggtctaattaacgattaacacttccattgacatggtcacacaacgataggtgcaatgcagcaataagcagaattatgtaacaggctcataacagacaggcttttacgcagacaggctttcacgcaggcaggcttcgacataaagagctcgggcatagtgggcgtccactctggaggtggaggcataataatgcaatgtactgaagggagagatggaggatgcggcttaccgatcgagcgggtgggcgcagggcctaatatatagtaattagtattagctcctgataggtgaatctgaccaagtcttttgctcaaggaccaactcaccctctttgctagagcctctgcctcctgctggaggtctttggtagtggcgggggcagagcctggttgagactaatgagcatatggtccaattgcccttttcgagctcgtcacggctggcctcttgggcctggcgcttgttctgtaccaacgaagccccaaatcaatatgattcattggatagcagtcaggaataattttactgggcgcacgggaggcccgagctggaatgcccggcgaaggcagacgcccaccaggcatacacccatactggcaagccagtaacaattctccacagtatgatcactgcgacggcagtgtgtacagaacagctagatcatatattaccgcatattccaacgatacatcaatacgtgcattgtatttggagctgggatgaggagaggtaattgttcaacacttactagaggaggaggatggaggggcattcgccatgctagcgaatgagcgtaggaccagatgttgttttcttttttaagaaaacactgggagcgaccgaaaaaaaaaaaaaaaccttgcagaaacagagtagagggaagattacaaggataggttggtttgttgggtgtccctgcttttatatgccaaggacttcactatgagtgggaacgacaggtcaatttctaagatgatgagacctctatgtctacctatataagaagcttgtcgatttcgccaagactcctggcattgatctatgtttatacaggaactcagtggcagtaatttaaagaaaagctacattctagtcagcgtagaatagcatcaagtcatcgcgagtgtcaaccaagcaataacaaaatagatatttcaaggattatttgttataatgactttccatagaaggtatgccgacctctccaagtgagcctacaacatatatgctcacgtgcagtataatcttgccacatggaagacctaatttagactagcaacggctgagacgaaagcagcccgagtccaacccggggttgatctgctatgaggcattattggtctgcagtgcatggtattcgggaagtcaaagaggatttgacaattgaattcgcccaaatgctcctgctttactggcccttacctacttctcccattccccatactttcgccatttctttcaaccaacggcccataacgacgatcaatcttcggtgtggtgacattggtccaaaggatttcaggcctagaacatcaccatgcttaggccctctcaccatgctgcgttccccgcgaaaaataccagacggacccgagatcttctcattcagttacctctttaggaccaatccccaaactcgagcaaccttaccccaccaaatccagagattgatgcgggcgaacaacgaaagtaatgtgttccaaggctcatgaacttttgataccgtgggaaaaggaggggaaaacacgccaggtacagatcttccggttgtggctggcccctcttggctcattacaagggtatcatttgtgatccattcggaacgctcacaaggctccggtcttggggaggtcacaagcaattacaaagcccgtgtactaggtattgtagtactatccaacatataggaacccttggaattctccatatatcctcgatgattggcacaatgtcctcccacaagcccccggtttttttttgagaggcgctgcgccaccaatgaaacccaaaccatgactaatccttgccatttcgtcactctcatccacggggtggactgcgtgaaacctgacctgagagacgcagatcgggatttgtgacgtggggattcaagattctgcacggcgaacaagggggtataaaggggcctttgctagctacaagattgacgggatcttccaggtacattcgggtccgactaaagaggcagtccgtgtccgtggtctcctggtcgtctgatcagatggaaagacacatgtgtttcggttcaaatgtaccctttatgtatatacaatctgtgtatacggagtaccacacatcattattatccccattctcctttgaccgggaagccgtaacatatgacgtaacgccgccgacctattagggtttccccgaatcaccggcccgtgaaggagaaggggattccatacaaatattataccgatggaaattgataatagaaaccaaatccaagtgctttatatgtcccaaggtcactaagatatatgtaatgaacgataatgacgaagaaaaaaacttccccctcaaaacgaggggaacgacatccactgacccaccgctgcggatgagaaagtgggttgagcctttgggaatttataacgtcgtcaggtcctaaacctgttacccaatccctgctcctctttctctcttcctttttgatcttcccctccatcttcaaatcttacctatcttataacccccccaccccctactacctccattttgaataacctgaataattatgtccaccaaggttttgctcgttggagcagcgggtgaaaccggaggctctatcgccaacgggctgttggataccggtaactttgtaagctcagcttccagggctgtcaattgaccccagactaattgttttatttttcgctgaacaggaggtcatcgctcttgttcgccctatctcggcccaaaagccagctatcacgcgcctccaggaccgcggatgccagattagaaaatgcgacttgaaggccccagaggagcagctcatcgaggccttggctggtattgatgtggtgatcagctgcgtcggtcctgccgaacaacaggatcagattcctctcgccaaagcagctaaaaagaccggtgtgaagcgattcgtgccatgtggtttcatcaccgtttgcccaccgggcggtatcatgtggttgcgtgatgaggtatgaggaatgtgccacggtactttgggtcagtggactgaccaggcttttactacgcatagaaagaaatcgtctacaaccagatccgccagttatggcttccctacaccgtcgttgacgtcggctggtggtaccagctcgcctacccccgcctcccctccgggcgcgtcgactacgccatgacatccggcaacgatgagattattggtgatggcaacatgcccacagcactgaccgatttgcgagacatcggtcgctacatggcgatgatcatttccgacccccgcactttgaacaagaagatcctcgcctacaacttggtatcctcgcaaaataagatctacgagctcatggaggaactgagcgaggagaagatcgaccgaaactacgtaagtcgcacagacgctcggctccgaatcaagtcaatgtggctaaccgattttttctttttccggagcacaggttcccgaagaaaccatctgcagcagagtcgtggcagcccgacaagccagtgaaacctatcccttcgacccaatcaagttcattccgcgatacctggctgaatatcaactgtcgtggggaatccgcggcgacaacaaccccgagtacgccaagtatctcggctaccacaccacacaggacctgtaccccgatttccaaccgacagatttccgcgagtatcttgagtccgtcattcgtggctcggctaagggagtctacaccgatcgtgtgatctcacggaagcaccaacgacacttcccgcgtaccgagtccagcgattccctctacacgcgcatattccctcgcacggagtcgagcgactcgctcatgtcgcgatgaatttatgaataggaaccatttttacgtatcttgcgttacctctccacctcacccagggactgttccagacaaacgccggcccggaaccgctgccattggggaatatttgacaagacttttatgacctctctcttctccccctctgaccccattcgacggggtcatggaattcagtatgcaaccgactggtgctttttttttctggggtgtcgacacccttttgggcgtttgtgatgttatggccttttgatagacgctggctactttcggtgcctcctcgatggcttggtggcagtcctcaagagctggcatatggaatgcttctattttttgtttatgccattcaatttcgattgtcccatgaagggatttctgcatatagaaaatatatcccaatcctgatcccaatcaattgtgcctcgttctttcccatacttgcacttgcatcatcactatcctcctggctccccggggtcttcttatctgggctgtccactcgatctctgatctttgattcacgtttctggtacctaactcatttgctttacctaatcttaacagtcagggattcatacctcttttttaaaaaatatactacctataggagatgtttccgcgacgccgaccgggatctcgatcctctgcctgcgaactcggacccatcagcgtcgagccaacgataccacaaacaatcccagaaactcatcagattgaacatgccctaggcttcaccgatatatacgggtcattgacaccccgtcaaatcagcatcatcagtctgtaccctccatctcgtacggggacttgcattttaacacaggtttgcagctattggatctgcaattggaacgggcttgatggtaggtactggaagagcattgtctatgtaagattggttcattataccgagcggattccttctgtgctgaaatttgctgactccgacacaggagcggcgtacgttattcccaaaaagcttatgagcgaagatattgattcctcgtagccggcagctattataatctcctacaccatcgtcggactcgccgtttacctcgtcctttctgccttgggtgaggtgggctcttggttaccaaaaccgtataccgttgcagaccaagccgttcgattctgtcatcctgcacttggattcagcttgggctggatgtaagtcccccttcgcgatgagaattgcgtctaattgatttattactgaccgcgcccctagattttggctgaaatatgctgttgtcacaccgaatcagctcacagctgcagcgctggtagtctcttattgggtgagtgcggagcgagtcaaccccggtatctggattacggttttcctttctgtcattgtgattctcaacttcatcaatcatcgcctcccgagcagaattgagttctatgtctcttccttcaagcttgtcgtcatgctaggactcatgatactttccactgtcattgctctgggaggggggccagatcaagaccgaaaagggtttcgatattggtcgtaccatggtgctttcggccctcaccaccatcatcacgcgttgctagagaagttctacataacctgctcgacgatgtcatctgctacgtttgcgtacatcggaagcgagcgggctggcatgactcacttcccgaacgttcgtaaagctacctcgagggccatccagaatactttctatcgaatcatggttttccatcttctagcaatcacccttctcggcatgattgtcccccaggactcggtgtctgtggcattttctagcgacgccaatcacgaggctgccgcatcggcattcgttgctgctctgtatctggcaggcatctccgtgctaccggacatgttgaatgcattcatactgttattcgtcctgtcaatcgcagactacgatctctatctggcgaccaaggcaatgtgcgacctcgcagtgaagcgccgggctcctgctttcctatcacgcactacccgaagaggcgtcccgatctacgctttggcggtatgctcgtcaactgcaacattggcgtatcttaacgtccgccaagactcaactgttgtctttggatacttcgtggacatggtcaccatgctcgggcttctgacatggatttccattctcatcacccacatatcttttgtgcgagcgcgaaaggctcaaggtattcccgacaaagctctagcctttagagctcgcttcggtctgcctggaacgtgtttggctctcattctctgcttgttcatctctgtcgccattgtctttgactccttcagcttcgattcgggcgttcggacattcgacgtcaaatcttttattgcctcgtacatcagtattcctgtctacatcatcttgatggttggctacaagctcgctgttcatagtaaacacgttgaccccaaggaggctgacctatggacagataagattgagccggagattgagagaggggggggccctagctgaagggaactgcttgtcatggaagccgttattctataggtcattctggttcgtccttggggatcgaaattattggtcatttttgtttatccacggggaaaagcaattaccattcgctatattctcctgaatatgtactccacacctacatctaggtgctgactcctgcttcaacttctaacaattctcaaaataacgactcatccactatgtagtatggcgaacagcgtctcacaattattagcccgtgtgactgatctagaaagctgcaagacatcagccactatgcagctatcctcccgaatcctcgacatgtaagatgtacaattgtcacagtgacaggccaggtggagacgctaataacatctacccggagttggcgcggataaacagttcttctgcacagcgaccagccgtggcctactccatggagtaggttgaacttcaattgacgagtcaagacattctactgatataagacgctcgtctcctcaagtcctcaatcctcaattctgattcttgggagactctgtataaggaaacccgatgcatctgcggtttgtttaccccaccatgcaatgcgctcgcatgagactgacaagaacccccagacgctgttgaatcttgtcatttcatcttttatctaacactccaacacaacaccgccaatttcgtttcctttgaatgggagctcctgtgctctacattccgatgaacatggaccaccatcccactaccccacaacaccagaaagaggatttccgcacttttatcaccagactcaacatcaaatttagcctcgagattcccctccctggaattgagtctccttcggcgcgggagagaaacaccagcctccctagtcagatctacaagcacatccgcccgctgttcttcaataacaaggttgacaagaaaagcctaattgacaatctcgaggaatgggtccgcgggaacctgccggccgcccagaaccagaaccagaaccggaatcatgtttatcaaacccatgcaggtcgccgagccagccaacgacaccacagcgaggaaccggcgcctccgatctcgctcaccggccctgagaaggataggtgcatgaggcagctactagtgctcatggaagatgaggaatatctgttagcgaatggccgtgtcgtaaacacgaaaaaaaggttagccgctaattcttttggaggtgccaaggagttatcattaaaaaaaaaaaggtttgatgatgatgaagacgtggagttccataccgcgccgagttcccctgtgaaggggtctgtgctggctcagtcgccgctggggaagaatgcggatgggagtttgcaattccctgagatggtgcaggctgcctttcgagggccgaaggagaattatggagctacggtcaataatcgtcgtgtaattcaatctcctgcgtggggatcgggaggaatcgcatcgccgacgaaaattcaagttcacccgtcgcctacaaagaaggatggaccgattcagtcgccgggacataataaagagaattttcattctccggcgaagtattcggggacttttcctccgccagcaaaggcgcaaccggtacatacacaccaaccgctccctaagagagcggccactaaacaaccatccaagccccaaggcaatattccccctcctagggaattgacgagcactttgtcgccagcgaagactgcagggggtgcgcaaccatccgcgaagaacccaggatctgtcttgtcgccatccaaaacctctaaaacccccaaatcggtcaaatcaccctcccaatcgccattgaagcagatggatcttcgatcgtttgggtttggcaacagccccagtaaagaaacttctcctccccgggaagatatcgaattcaaaagaccttctttatttgaaaagcttagcgcggtatccgatgaatcgaagcgcaacaatatgacggagtcacctgctcccagctttgcagcgactacttcgtcggtctttatgtctcgcgatagtagcatgatgcaatcattcgatactgtcgcaacagaaatgaccgagccaatggatacccaatcaacctatgcagactcgattgtcgggtatatggctagcgaagagatgcaaagaagcgtggatgctgctgctatctccatgatggtagctgccgatcccgccgagacggagtatgccctgaaacaagagtttattggtgagctgttgtcctacggcccgttttcgggagaagaatccttctcggcgaaaatcccattgcgattccgatatgagctggaacgtatcggacgtgcgtggggaattcccttcaaacagatactcgttggcgaccgtgttaccttcaacactcaagatgatttctggtcatgggtcgccgggcttggtcgacgttatggtcatccgctgccagagaaatcgccccgtcgggcctgggatgctgctgttggtgatttcaaatcagataagcactcggaggtggtcatactctcaggagatttggactggtgtgacgacaccgagtcgggtattttcaaattgagacttaacccgctcaagccagagcggacgtgtcggttccaccgaagatttggttcggatagattcctgactcttaccattccagccgctgatcggcctcccagccatcagaaacagcctgcttacccatctgtccttcgcgagagtattgctacctggctcacgcggaatgatcatcattgcctcggaaggacgtggcgggctttctatgtcgaggaaataaagaccaagcgaaaagtcaaggctgagcctcggttccgggtcgagttcttcgctattgatggcgaagacttcgttcatgggctccgtttaccaatggtggcccctccccgacagcaaagtgataactatactccgatgagtgtagacgctttgctggaatggcatatgcccaagactgcgaatgcgaatcaaagcaactgcaagctcttccagcgtatctctcttggtttgtcgaagacatttgcgacggtcaagttaaagccgacgcaagtgcttcgtttgagagacgatccaacccgggctgttatgaatgatggatgtgctttgatgtcgaggactcttgcgaaccaaatctgtgaccaactgggcataaccaccgccacacctagttgtttccagggcagaatagcaggcgccaagggcctttggatggttgattcccacagatctagtatctctactgtgaacgatgatgatatctggattcagatctcggactcgcagttgaaaatacacccccatccggaggaatggattgaagtggacgatgacccccatccgcaggaatggattaaagtggacgatgagaagttgaccttcgaagtagtcaactgggctaagccgttgcaccctgttgaccttaatatccagcttcttgcaattctagaatatggagggaacgtgaaggagtatattaccaaactcacccgtgatggtgtgcagagtctttacgacgacttccttgaggttcttcgatcaaatagccccgtgctttgtcgagccctgcttcagaagctcaaaccctccggcgaggacggaactggcaaatcccgacgattagagcagtgggtttccagtgatgctgagtccattattcgtttctccgaggctggctttgctccgcgcgatttctttccccttcggatgaagatccgtaaattcttgacatggcttcttgagcgacatgtcgaagaactcaaaatccaggtccctctttcaacgtatgcttactgcattgcggacccatatggagttcttgggccggacgaagtccactttggcttctccaataactggcgggatccacagggccagtttgaagacaacctcctggatgggatagatgttctcgtcggccgacttccagcccatttgccgtctgatattcagcggcgtagagccgtgtgtaagactgagctacgtcattttaaagacgtgattgtctttcccactacaggggatttccctctagccggtatgctatccggaggagattacgatggtgatagaccgtggatctgctgggatcaaatgattgtagagagattccgtaattccccgatgcccgagcatgaatatactgcagagcattacgggctcacgaaacactccgtcccgatggcttcgctgaactcgacggaggactttttggaaagtacgttctctttcaacctcaacctttcaaacttaggtcaatgtactgtcgagcatgagaaactggcatacgatgagtcagtcgacttttcgggggcgaaagagctggcctgtctcttgggtcatcttgtcgatggccggaaaggtggagttcatctctcagagcaagcctggaaagaataccgcaagaccattagccctaaccaacgagcgcttcccgcgtatcggaacccagagcgcaagtccaaaccgtcgaacattgttgacttcctcaagttcaacgtcgcaaagtcggagctgcacagaattctctctggtctcaacgaggcgttccccgagaacgatatccaaaaccagctcgatgaggacctcgttcgtccgtggattgaagcagatgaagcatcgaagaccaagtctgagcacaatcaagaattaaaaaacgccctcgctgatgttcgaggggcgatcaacgaactataccagcagtggaaccaaggacactctgcttctactgacgaattctctcccatatcacgtcaagctgccgagaatgcgagtgcactccctcctcctaagacgggcagacatccgctcatccacacctggcaaaacagccccaatgagtggcgacggttggtagcttcatgtgcctaccgtcgatgcccaaactcccggtttatcttccacgcttttggcgagacattgtgcgagattaaggcatccgtctcgccatcccgccttgtcactaatgatgtgatcgcctgctaccgagtgaatcagaaaatggtggcacatatcacggccaatgcattgcctgggaatgacgccgatgatgtagatgagtatgaagacgaagatgccattgaagccatgctatccttttaaaggggtcattacgatgatggattggaggacaaactgtccatcgaataagatacgagtgacgccagcgaccctgtatttgatctgcccattttgattctgagcgatattttttcctgttactgttgaacatcgcatgagataccttgttgttttgcacgtgttggagtcgatatatagcgttgtcccccgtcagatgttgtcaagacttagaatactttgaacaaatcataccatcagacttttgcctaaagactccaaaacactatcaagtactccatagagaaagttcatcctagtctccaaatgtcaatggcccccacatcacatgccaagctcgatatgccgaaccaggcccaacaaatataagattgggcttataaatccattgaaagaaggatcatattggtgctgtgcccaataataaaacacccaaagcaggctcgtaagtacatctcgtaccggtaggccaaagatcaataaatttccttccatgtactccgtagacatgtgataggacggagcaaagtcttccgggacattgtccatctacattgtacattgtatgcgtacaacgtacggaggagagggaaaaaagaggtgaaaccgaagtggtgaaccgaacacgatgcataactagaatttcaacgtctagttcatggagggaaggtgtcagggatcaagagcaacccgagttgttctcgtattcggattgtcgagtagattctagcacatgtagggatacgagacatacattggcaatgataaaaatggaaacatataaaccttggaggggtttaggtgccttgtttcggggaccacggcgtcttctccgtaggacatttgtatttcttatcgtgtataataaatagtatgcgttgcgatgggtgtacatcgtacttcgtcggaatagaaatcctctattgaaacgccctacaggcaggtgcagagtgcgcccatcgtacgcagggcaaattgttgggcacttcagacttttcatatcgaatcaagtaaataattttcggtaagattgaagttccaagaggggcgaaaggaggcgagtgtgttggggcaaggaacacctggagatttggcatgtgatgaggaaaggtacatgggcggccataacggaatgtactgccgagcaggtaccgtgggaatgtgattacctcaccttcaatgttccttcctaattgggcctagtggacaagtgacgctttttcacgtgaaagacgatacgatgcgaaactccgacgtctttgaggttcattgcactctctctctatggacgatctgtgacccgccatggaacccccccaatccgctaggccaaaaccacctgcccgaaagaataacgccacagctctgacatcgtccaattcacacccctccgcgcatacaagtaacctcacttcatcacttacggctccaccctattataatggtcttccatctatgatggatatcgataacccagaagaccggtctcgtcgagctgccagtgtattatcgatggatgatctcgaggccgcgcaggcccttgaggggcttcgctccggtacgttggctctgatatccccgaaccggcccactaaaagtgtcgcaactgcggttttcactggattcggatggctgtgcaaccgacattcaactaatctcaacaatagattttggacaaacgcctggaacaacgcggcaatccctccccatcacttcaccggacccaccaccgccagagccactattgtctctgctgacttcctcccatccacttatctcctctgctatcaacggctcagtttctgcctacgccacgtcgaaatcatattcaccgcgattcaagtccggtgctgagttcatcgagcgcaacatcggatcacctgtcgcgaacaccgtcggtacggtaggccgcaaaactggtgtcgagagcggtctccgttgggcgttacagcgacgagattctacaggcgaaaattcacacactaaaaagcgacgaaagatggatgagggtgtgtcgccgagaacgatgaatgcggagaagggacacccaccgcgtacacggagctcgtccgatctctccatggccgagtcgctccccccgtacgacgaaatgaggtctcctcactacgaagagaaaccaagaagacgtactgaaccgacatggcaaagccgactagttatttcgacctctggactcggagtcgccatgagcgaggaatcgctacgtagtctgcaatattgtctgacttggcttcgatgggcaaatggccgactaggcaagtccattgtggcactacatggtgctgtcaacgagtgggaaaaccaaaaagcacgatcacagtcggatatcgaggcagggggcaatggccaagaaagtgcctcgttacttatccagcgcattcaggccgtcaaggccgatgtgttatctaccttgaaacaggtagtggatgtggtttccaagtatgcaggaggtgctctgccagagaatgcccgccatctagtgcgtcgacacctgacgtctctaccgcaccgcttccaggttgcatccacatcgcagccaccaccagactctccagccgcctcctctgatgccacaatcagtgcccatcgcatcctggtgctggcccaagagggtctagacatgatggcgcaagtcagcggcgtcgtcaatgacacattggtcagtgctgagcactggtgcgagcggcttggccggaaacgacccgagaacggagcttcatccatgacagagaagcagggcgagtctgcttccgacgctcagccgtatgacatggatgtcaaggagtctctgccagagaatgcgattcaggacgacgtcccgatgtctggaatggcaaaggtatgacgttgtccaagagcttcctctcgtctctttacatattcataatttctgtcacttcttgcctcttatctcggcggttctcttgtttctctcttatctggggtcttcttttcttttttttttttttcttctcatgattgatatcctttctgctatcttcattccatctggagtgataggaaaccccttggaaactttggtgtttgtttgtttaagcgtgcaatcattgtctatcctactattatagttatggatgttggttttcggtatagatatgcgcaagaggctgcgcgctcaggctgaatgaatgcaggctattcatcaatttacacttgagattttcaggagatcgtgtaagcgatctaaatcgccggggcctgctgaacacatgttttctggctaaatcggcccggacctgtcaacatactcaaagggccgtcaatcacatgggccgctatgtttgccttttcgttctagatcgatatcatttcaagcttatccacactgggctcttcgagcgggccaccccatcctatggcttcaagaccacaaataccctctgaggaaacaccaaaacacctgctaatagtcaggcaacgtttcactgttgacataaaatgtgtcataggtgctgctgaagccattgaactgggtagcagtggtacttgtatatgctggaactcagtcagttctgaaaatccagaccaatataatatggcaatactcacctcccatgtttttatatttgagccaatctccaaccttgacttcagaatcaagcgtcacctcgcgcacaacacaatcggtgctgtcacatgtcggtccccagatcgagtaccgatgggggatgcacaaagcatcccctgatttgggtttatgcaagaaccccctggctttcttactgaccaaataaggaaccatgatctctttctccataatcacattcatgaaatttccatatatgccatcattttgataaagcatgtctggaacaccagatcgagcagcactcccaagctgacggcgacgtgaaatcactcgacatacaagagtatacacactacgagcgaaaaaccgacctggctctgcgatcgttgtgataccagctggaaactccgaccgaattgcgtctcgaataataggcgccatagactcgaagcaatcgtcttgaaagccaccgccgatatcgagaattttggggtggaaacctagacgttccgcttgtgagaatgccagacgtgcatctttgatgcccttgcaaaatgacgctgggttgatagcacccgtccctaatagttcaggatggtcaatacatctgaccagctaagaagtccgaagtaccccggtgcttaccaacgtgaaagctcacaccaatcacattcaatccaagctcccaagctcttgaaaggagttcctcggtcgtatccaactgcgcaccaaacttttcgcccagacatatgaacgcaccctcgtcattcgcgtagatccgaagcaacagctgagcttccggcatgtgtgccttgatagtatccaattcgtcgatattgtcaaatgttgtccgcaagacaccaatatcgcgtgcgaaagctacggcggcgggtgctttgcagggattggcgaacagaatccgggctggatctacaccgaggctgagaactgcgcgcatctcttcaatggaggcgcagtcgaaccccgtccccagttctgcgaggactttgaggaaggttgggtcgcaattgcatttgaccgctgtgggaagatgttacttttctattccaaaaataggaacggactagaagaggggtgttgtaccgtaatacggtcggattccgggcatgttctgggtccaacgacgatgctgtcgaagtacctggcccaaatcggcgatgaagaatgattcgtcactgccaacgagagagcgtttgactatacgcgcaatgtgactctcaattgcgaggtcgactagctcgtctggtgggagatttcgatatccggttgcatgtataaccttgctagtgagcgcagtttcactaagagcagggagaagggccatgactgtggagaggagtcgatcgagaagaactggggaaaacggagagttctgtaactgaaacagcattacaagacatgtgtcggactaaaatacaaagtcctggagtatatgaatgttttcgagtgctgcactgcgctcttcggtgaacactgcgaatcaatcgtttagagaagctcggatgaagtgaaaggtgaagaaacgccgttaaaaggcaattttgcacgcaattgaaactctgcattacgttggatctcacgggaaggaataagcaataagtcgcacggataaaggccttgctttccagttaacctgtgagggaaccaattatatttcctgaagttgacgtcttgttttctatgtagggcttttcgtattctgggtgaagatcagcaactagtgctagatcgatcgagctgatcctgcacgattcaatgttggggatgaagtactccatatatcggacgtgatcagctcaatagcagctattatgtggattatggtggagacctacagggtcgagtgaaggcgtggagctgaatgcatgcacggagtagagtaacatcgccacacaagtacataaaggtcaaatctacactgaatatattggatagtgtgaccagaacgatggtaatagtatatttagaatacgaagctgaattgcgaaggtgactgatattccccgggaatgtggaatcgaactaatgtctgtgtctctgtggaatgaacagtatacttgatagcaacgcattcaatactttttatgtcatagaaactgttgagtttcgacatgcaggaaccactccatttccagatgtgatgcgtcgatctattggggagcagctgaaagccctagaaaaagaaatgcccagcattctttcagtcgaagatgagttattttcgagacctccaccccagattattccgctagggcctcgatcttggtgctttagctatgctcatcggctttctcgggctattatacggttacacatcggatgcaccaagcaacacatgtcgaacttgggaggcctcgagctctgggattgactcgtatatttgcttctttcaaaatgagatctacctagctatgacctctagggtgtcagctgtctatagatgggtgttccttataacatataatattgaaatccccgctggagcttcctcaagccccgaacactttggtttcacagactagttggagtcagaatgaccgggaaatggaatatccgcttcaaatatatcttccatatatgctgtgcgatgtctgagtaagactttgtccgttcccagacctaaaatgtgtatgcacgttgacaaagccttgaagaccaatcttatttttaaattcactagaaagccaacctccttcacaatgccacgtccttctactcattggtcctcacttcattacaggaacctgctgagtgacgcagtgaagcaccccaccagtaagggggatggcgttggcatacacctgccgaatcacccgctcagggagcaagcgctgaaacatttccagcgccttttgatccctttcttcgtcaccgaatctggggataatcaggcctccattaacaaaatagaaattcacataactcgccgctagttcgtcgtgatcggatttcaccaagcctcgtgggtccggctcttcaatggtgtggatctgcaagcgccgacccttagcgtctgtctcgcggtccagaatctctcggatctccgtagacagctcctgccacaggtcaatcgcaataggatgtggttttgagtaagcgatgacaccagggcgcacgaatcttgcctcagcatccatatgcacgtcggtaatgtcaacattgcgccgtcctgggaaccagatcaccttttcaatcccgagcagccgcctcaactccgtctcgatctcggccttggacatccccgggttgcgcacatcacatacaatgctactctccgtgataagcagcgttccttcgccgtcggtaacgagcccgccgccctcggcgcgaatcggagtctcgatctgcgtaacggggccgggcttgcgatcgtgctccattacccaccgcgcaaaattggtgttttcctgtagtgccttcttgtccatcacaggccatcgctgaccccagcagattccgtcgtcttcgggtttcttcccgccccattcattgaagcggaagttgattgcgaagcgtcgattcgggaatgcgcctatcttgtcgcgcacgtagactgggcctgtgtcgcggacccagcagtggttgattggacaggggatgatagatatttttgttgcgtctttcacgaaagtctggactagggactcggccaatgggatgtcttcgggcctcacgtatagccgaaccggttcgaagtcagtgatcgccgccgctagttgagctaattcattgcacatggcgtcaaactgatcggggggtagggaacatcgagatggtaatcccatgattgtcgcttcatgaggctccgactctgccgggaagatgtagctgctttgaactttgctctcattactgctgatgtgagagggttggaaccaggtacgtgtagtagtatagagattcgacagaaatttgcggaatcgctcgaatagcttcatgctgatggtcgctcgtgagttctcgcccttctcgtatcaagctggagtttctctccttcttaaagatgcaattcggttgccttcgtcctcattattctcgcacatcatctatttcgtgtaactatgagtgcctcatgttactcacagtttcgaagttgtgttcttggtgcggagtggtatttccattaaaatcaccgagagataacatgatttcggatatatagaaaggattcaggcggaagagatgttaagaggaatatatatagcgagggtttgtatgtcaatacgaaatacccaaacgaccgaatagctagacttcacgttcagtggtgcgagagagaaattataatctcatctcacttctcatggtctcaaaacaaatgcaataaaaagccacgtttgtgctactatatacagcatggtgcatgctactccgtcagcaggggttcacgttccatctcctcatcggcagactcagtccaggagacttcttccataggaccactgagccacaacataggcatagccgtaaccgcagaaagaactcccagtgcaagagtcataactttccaaccgtatcggaactccacgaatccacctaccataggtcctaatgccaaaccgccaaaatgtgccatattctctaagctaaaagcttgagccacggcacctctgcccccaaagacccccgggtctccagcttccatgtcatccaggacacgctgcatctccactatcaaggccggctcgcttaaatcgatgcacattccaacaagacacagaatcacacaaagaagacctatgtgggatggtgagttttcctcaacgaaacgaagacagatcagactcggggctagaatggcaaagcttgcgaatgtgatcactctcgcaccaagacggtcagatagaaatcctagaaagtaggtcagatcatgcaacatagtatgataatatgaggtcagttaccaaaaaaaggttggaaaatagcggctgcggcacctggcaagaatataagcccagcgcctaaaacattccagttgaatgtgttctccacaaatattgggagtgtctatatagcagtgtcagtacattccaatataaaagactgaattccataccgcatcgaatgccgagaccacaagagcgccgactgtaactgcccagaggcaaacaagaacccggggctgcttcaaaatctttgccagcgcaaaactactcttagaaatttccgtgatcgtatccctagtgcgtatagtctcaaaagttccatatggcggctgctcggggatataaccattctcctgggttggccgctcgccatcagtgagacacagccaacgttgagcaatcctcttctcaacaacagcgagtctaagaaagaagtcaagagcaacgattccgaaagccataccaaaaacggcgtagaatcctccaagttcgtaaactagtccgcccagcagtggaccagacataaagcccagtgtcatggcggtgccaagatacccaatcatctgtccaagactcgctttatctactgcgtctgtcacaattgaaagaccagctaccgagaccatggccgttgctgcgccttgaagcaccctggcgatgatataccatgtcactgagtgcgaagctgtcaagattaccatagatgcgaacaacagcacgagtccggatagataggggccctggcgtgttccagagacgtcaagtatgtatccgaacatcggacagcaggtaaatgccgagacggcttcggcgatgaggaggacactgttccaatattctcctatcaaaagagaggctattagcaaatgattatctgtcctcgtaaatcttcgtactgtcttcgaatgctaccccagctcgtaaaactaatgcctgcggcatgacggggacaatctgtagcggtcaggtaaatatcaaaggtactagtcagagcatgtgtaccatagcgtagagaaagagatccttatgagtttgattagctgaagcttagtttgtctggacaggggatcggggaggataccgtgaacattgacagagaaatcgtcgtcactataaaggattgcgatgaccttagcggcagcagccacggtcgctggtcgcgaagcttcaaaaatggcttcgaccaagtcatgattagtgacctagttcaaacactgtgcgaatggtatgaggatatgagttgaataggtgggcttgttcttctttaatgttctctttctgtatgcagtctagaacttaatctgcattagcgaccgcaattgggtaaagattctcgttgatgtgttcaattgtactccgcagctgcatttacaatctgtttttgcgctagacactgcaagggagatgctcagatcactgctgatctctggggcactgtggcttagatgtgtgaatgacgttgctgcatcacatacaacatataaatttgacagttataatgaatatagatgcctattatcaatctcaaatccaacattttagagggaaactgccggaaccctaggtcggacaggtgtcttcataatatatttctggccacaaaccaactctgtgaaacgcaatgacatatctcgagaggatttgagcaatgcggtttttattattgcgtagtcgagctagtctttgcgcgctgtgctgaagtaacttgcaatcagtagcctgtatatccaaggccgtgaacttgggctgtccaccatttttagccatggtaaatattgcagtttccctcaacaaatcccacttatacgacatagcaggctctttttcttcctctcttagctcttctgcaccatctatcaagttcctggctgtttcgttacattgcttcttagggactgcgcggtaaaacatgaactgaatgtagatgaactgagttactccatgattccatcggcctagccaatctgtcacgatgaagcgcatatctccgtgataaatggagcgcaagaataggagcctcgacgttatttcccgatcctactttgtaggttacggagtaggtctgtttacatcagtttgaaaagacgttggcttcttccaacataccttgagcggttactaactatcaggagattggcactcgttgggtccatgattaactgaagaaagtataaatttaagcgaatagaattctctaaatgtagcgaactggcgggagactgcgtacgccgtcatcttcgtttgacttccccccccccccccccccccccccccccccaaaccttacccgcccgcannnnnnnnnnnnnnnnnnnnnnnnnnnnnnnnnnnnnnnnnnnnnnnnnnnnnnnnnnnnnnnnnnnnnnnnnnnnnnnnnnnnnnnnnnnnnnnnnnnnnnnnnnnnnnnnnnnnngtttccccccccccccccttcacgtagttacaaacgaagtcattgcgagatacgttgaatggtggggctagttattactatattgcattaatgccttatgactcttgtacgtagagtttatttatgcttacaggtgtaagcatgtgttcattctccacacccacagttttaaaatagtacgcggaacaagatagagccgtcagtgctgcgtatacagtataggtggggcctggaaattttatagatggtagttggaacatgctaatgcagcccaatatcgcttagtaggtcatcgttttgttactctagaagtcgatttaagatgagaagaaggtcaatgatgtatgtattaggtgagatattagaacttctctgtgaagcatcacaacagaaacgatctcaaacaaacgaactaacaagtatggaaacaaagtataccacatagctcctgtaacttttccatcgtgcaaatctgactgactccaaagcgaggcgcttagagaatggagccaagggcaacacaaggaagaccggcaccgacaaggtcgttgctggcagtggagggtgagttggcgcagcaggcaatgttctgcttgcactgctggttgaggagatcctggacaccgacaccaatgaggacagggactggagcgggttagtgagggagttgacaaatgtatagaatagtaaatcttaccctggaggtcgagcttggagcactggtcgaagacaccaaggccggaagcaccagagccggaaccgatgaggttggagagggtgccggcgaggatgccagagttgatgtcggtggtgtcaccggcgtaagtggccttgttgcagcaagagagctgagcctggtcaccacacttggactgggcctgctggacagtcaggctgtcgggaacggggaagcgaggagcgccaccgttctggtgctggagaccattgttcatgttctcagcgggcatggcagcggagaagccagcgagggcgaggacaacggcggagagagtgaactgcatcttgaaggtagaggattgaaagattaaaatcttaaagatataaaaaggttttaggaggtttggaagatagaaggttgagagaggtagagaagtagagagctgatggataaaaaaaatttggtacgacctggtgctcgccttttatcttccgttcacagtgcttgggcacgaggtgatctcccagtattcatggtgagggccaaatacaaccctcccatttttgcggatggaatgcagaacgcaagggtttagtcccgggcctgccccgatgatctccacctcctagcaatatcattggctcatcctcgattcccggaatttaacaatcaatgagatgctcccccttggcccctggagatgcatgggtcctgcattccgccctgtcagtggtatctgtcaaggttaccttacgccctgattcagttctaggatgtccaatcctggcttacatattttgtaaccctgcgagcctcacatgaacccctaatcaaacgagagcgagcatacacgtacattaaattagagatccggattcagagtccttctagaagtgatcaaggcgtggacaacccctaccgatgaattccctacagttccaaaagctgcccatgcgcaagtatttgaccatttattgtctttatcgctgattaacataccttggaggcgttcgggggcgttcgggggcgtcctggtggcagaaattgtccgatatggtgcatcttatttccattccaggcatgattatggcagcgtgtctttgcggcactttctaccttgttgtatctttgcaatcatgcgtaaatcacagtagagaccccgttcaattgccgtcccttacccatacttggatccaccgtctacctatctctcagtcccagggaattcgagatcgtcggacccgtgtcgatcatggttacttcggattttctaccctgctcccaggcatagcgtgtgatgttacgatgggcaaccgctgatctacactctcccttgtcgatgcaaaatcaaagcatcacgggaaattacaatgtatggaattgcaatgtatgggccttcagcatgttctctccatcaggcttggtctagatcgaacgttttcgggtctgatgattacaggctataggatgccaggtgatcctaatcaaattgtatttgattgaagaatgaattgtatactctaatagggttagcagtagagagtagctcgaactgtaccttgtcacctcgtccaagaagttgtgtctggtgtctatctacgatgtgtgtagattgtatgagaatgtttgaatgtttgaatgtttgaatgtttgagggtaccaccataaagaagcagactcgtagactcattaaggaaacgagtgaaatgattccggttcttatatgttgtagtgtgctataatgtcgatataaatatatatctccaacgaatgtcgaaaccagagatattatcccgcccagatttaactctttaaataccacatgctaaaccatcgatcaaaatgcattgcttagttctactcatatctttttaattagatcattgacgattgagccttaatgcttcaatggagaagcagttcatccgcatcgggaggttgttcatccgccactaaaccactttcggcttaacgtacgccaccggtctacctgtattccgtactttaacctcactttgctactatgtatgttgagtcggaggcggataaatatcaaagggtcaatatgagtccgtcgagaggacattatataccgatcgctagtataaggatgcttgaatcattagggttctatcatcaacattgcaatccatttcgagctctgcaatacaagcaaatcccaagctccaacccactctaaaattcacaatctgaatcccaaaacctacaaaccatcaaatcctagaaatgacagccattgcctttttcggagcaaccggtggctgcaccaacgcatgcctgacctacacccttctcaacggttacaacgccagagcgctagtccgcacgccctcgaaactcacgacactgctcctctcacagcctgacataacacaagatattctctctcgccagctggagatcatcgaaggcgacgcaacggacgtagaaagcatcaagaaaaccctcatcacaaactccaacgcacccaatggcgcatgtactctcgtaacaagcgtgatctccggcctgggcggcgcaccgacaatttccttcaccaaagaaacaaaatgcgcaaagactcagatccgtactcctgctctgccacacattaagctctcgaacccgcacatcacagaacagtcgacgcgcgcgctgctgacggcgctggcgcagattgcttctgagcgttttgcctcgctcggggcgtatcgtgccgttgcaccgcgggtcactgtgatctccaccacagggagttcaggtagtaataccgatgtgccgttctggtttagacctatgtactctgtgctcttgccgattccgcatgcggataagctgcagatggagaacttgcttgatgaggaggttggactgggctgtgccggggtgcttgctgctggagttgttgttgtgaggcccagtcttttaacgggggatcatcgggttcctactgttcgtgaggggaaggggggtgaaggggtggggctggaaaaagtgagggttgggacggagagggcccctgctattgggtatacgatttcacggggtttggttggggagtggatttttgaggagattgttaggggtggtggagggaaatgggttggggagaaggtcactatcactacttgagcttttcgccttctcttggtttcgtgagattcacatatttttcgttgtttgagaagatagctacgttgagtgcatacctggaagtgccacaaatttttgcatcaagtactcaaaagatcagctgtattcaaagatcaacgttatatacccaaaatcacaagtcactgcattgtatcggctaaaagcaaaacgcccccgtaggccagaaaacaaaatcacagaaagcaaatatcatccctacgggagacaatgaaactccgtataaaaccaacgataaaaaaaaagcatcattaacatctgatgatctgtacaggtggggcaaaccttcctaatgcccatttcatgacgttcgtgagagagaacatagaacttgctgtgatcaggtgcccccatgcggcgctgagcggtcgatatgagcactagagcggccaatctgagcactggaacggccaatctgcgcaccgggccgctcgatttgggtactggtccgctcaatctgaagactgcggcgttcctccttgatcctcttcttttccatcttcctcatggcttcttcggtcagctgttggcggaacagccgttcgacaacatccttctttcgggtgcgccggtcaccgatcatgatcatcacaccacctgagatgttacaagtgatggagaagcaaaggataaccgttgttagagcgaatgggcgcctatgagggtcctccatactccaggtacaggcaccaagagccatttggagtatagagtgacagtcgaggatgacgacaatagcgatgagtaagcgtagagggaaggcgtggtgggtcatagtttcgtgcggcttatagaaagtatgcgactttgcgaacttattctggtgatgcatcaatcgtaactgttgatgagcactgagaacagaaaattcatgttcctcttccttgactgcttcaccaaattcaaggtcggcgtcggtctccggcttcgacggaagatcgttcttatccttgaggcttggaagggcccgcttctgacgaagtttccacgacttgagtgtgtaatgggcaatgaaactcatgtgatatgtatccacggcgcggaaaggagccagtccgtcacccatgatggcgaacagggcaactaaaatgttatcgatgatattgacaacataactttgtctggcaccgagattgatccaacctgaagtgaccgtcagcatagtagatagaaagtattaggtcagaatatctcaccaatcaagaaaagaacccaggccagaccgaacagagtgatcaaagttgcgtagagagtcacaagaaagccgagggctaggcgacattagtattaagcaagaaagtcttggcgatgaacttctctcacgcttctttatgtattgcctaaatcctttcatggcccgtttgaacttggaccgccgagagtgaagcatgtgtcgaacatgatcatttagttcagcataatcttctctgctccatccttcaacctgccctcctggaagaacggcatacttgggaccaggcaacaccgaggacatgctcgtgaaatggacttgttctaaattcggccgctccttaagcttgtcatcggacagttcattatcgtccgttgcagttcccggttcatcatctgaagaagaatattgtggccgtgtaatcgtatatgtgggcatgcggttgacgaaactacccagattcggcacgaagagagagttttggacattggtgagagtggaaagcgcggaaacctcgggatctaggttcggacaagttagaaatatggttcttggattacacttgatatcaatgcttaccgatcacgtccagcacatcgaccacgtgagatccatactcatcctggcgttgctcctcctgttgcgtgctcagagttggtgcagtccctgtcactgtagctgcacggttccgactaaagcgattcatcgcagcttgactacttcgtctaagccggcccggtcgcactggggcgggagggacctcgccttgctccaggtcaggttggtcacagtcggaccgagcccgtccaggcaatattgccgctggagaagggggtgccggactttggtgtgaggcttcctcggtcagaggcaacatccgcataggggtcgccactcgagagaggccatcgggaggggggaatggccattgtcctggatttggctccgagttactgcgtcgtcggtttgccagccatgattcgtcctcttcattggggggaggggacgggatgggcctcggttcaaaggacgatggtggtcgactccctgattgagacgccggttgattggcgttgtcgagtgaagcgagagatgggaagcgagacaagcgaatactcggtcgtcgcattcgtgagtcgccccgagagcgtaacgagccaaggcccggcctgacggggccagactctgtgggttgccctgtgggttggatctcctgaggatttccattagaggtcctggggtcctcgaccgggtcgataggatccatcttgctgcaacaagattcaggaggttggggacaagatcatacaataaaagtagcccccgagaccaaaagaaaaaatgagataaccaaggatctgagactcccgagtccctcgttagtccccggacgttctggatcttcggggcggttcacgtcccaggctgactcagctcttcccgaatcttgtttttttctttctttccagtgacgagccagtggagttcacaagttcaatatcacgctaaattgacgatctttctttttccgttctggagatcttctttcaaggtcgaaggtcagatatcaattgcgtaagtcctgaattggagccacctatgtaaatggactacggtgatgaagtttatgcctgatattcaaggtgtctagactcttcatgcggcgatggcgataaccggggacccggacgtcatcagaagagaaccatgtagatctatatcgtgcgttacgacatattgtacaactttgtatatgtttttgatggcaattaacagggttaaagttcataacaacttgttccgtaggattcattccatgaccattttagggttattcattatttaatggctgcaaagatggctagagagatgtacgcattaaataacgattttaaacgaccataacaatgagccctgctctatctttaaactatttctctctcaaggcacagtactaacagctttcgttgtctacggagacgtgcacggagtgaaacaagcatgcgataaactcaacggcttcaattttcagaacaaatacttggtcagtacggtacgtgcatatggatcaaatgagtatcggtaattatttgaagatgaccaactttggatgttatatatcatcgtgacactggtggttaccgctacattgtagaagaaaagggcccgtgccattctaaaatatacatcctattccttagtgccaaactcaagatgcataccgaggcatagtttacatgcgatcaaaccagaccgaagttgttcatgaggaatgaccttgagttggccaatgtttctaaaactcgggtagatgaggaattaaccgacagagataggcccaagggctagattgtgtttctagatcggagctggcttgagcagagataattacttgtgagacgactatgatattgtgtaagatcaccgtgtcacccgtgtagcctgccctaatacttgtatccatgaccgaataattctggttgcatatcaaagtaaacaattgtatatccatgtcggccatcttctacaatctataatgtaagatgaacccgagccaagccgtggagaacatgaagtggagataaatgttggaagatcttgaattatttataggacctgtcacatctgcatatcatctagattctgcacatgtgcataacgtgcagagccgaaggatgagatgaataaaatggactaatcgagtggaataatatagaaaggacgaaagccaagagccgattatgattggcgggaaaccctagaaagtccccagaatgacatcaggtcagctgttctgagtcaggctttcaggtaaggcggggctggtgtttagggcctaaaggcgggacctcaggagattctggggctcagcgcctaacaataggggctggttggggggaaataggggtatcgtagggcagggggctaggggggtacctacgtgaacagccccccccagtcatcgaggcaagtacctcgattgcacctgtcgttgtcatttcgagctctcactgggctagtgccacaccgcctctcctttcccatttccatctccttctcccatcctcctctttcctctcttcaagatccagttcatccaaacttcaatcccatcttctcttttcaattggtatctagggcacgaagctaccctgctccttccccccgctccacctcccgtcaagtctctttcagctttaggcaaataaacaacccgactcttttcatcctttaatatctcaaccttcaagatgtctgaagtcgatacacttgctgactccgtggctgcgaccactctgaccgataagcccgaaatcaacggtgctaccccttccactcaggcagctgatgccgcggctgccagtgcagatgagggtcgtcgtctttatatcgggaatctcgcatacgcgacaaccgaggacgagcttaaggagttcttcaagacctacactatgtgagtacttcccaaattagtgttttcgtccgaacaatcaatcccacccggagcaaacattcaatcacgtggcaccatcatttatgggaccatttctaactcctttcgtcttaaagtgagaccacctcgatcccggtgaacccccgcaccaaccgtcccgttggctatgcatttgtggatatcgccaccgcccttgaagctgctgctgctatcgaggccctttctggcaaggagattcttcagcgcaaggtgtccgtgcagcttgcccgcaagcccgacatcgccgagcccaaggaaggtgctgccagtggtggtgagggtgccgaggctcgcaagcgtgctgctggtcgcggccgtgcccgtggccgtgcccgcggtcgtggtggccgtaccggccgtagccgtgctgtatgtgccaaatatctttccttgcttgaatctacgcatatcgacactttgaaatggatgctgacactcccgaaggcccaggaaggccaggaagccaccgaggcccctgccagcgagactcctcttgctgacaccaccaacgataaggatactgcctccaaggctggtgacgcccccgctccaccccccnnnnnnnnnnnnnnnnnnnnnnnnnnnnnnnnnnnnnnnnnnnnnnnnnnnnnnnnnnnnnnnnnnnnnnnnnnnnnnnnnnnnnnnnnnnnnnnnnnnnnnnnnnnnnnnnnnnnnnnnnnnnnnnnnnnnnnnnnnnnnnnnnnnnnnnnnnnnnnnnnnnnnnnnnnnnnnnnnnnnnnnnnnnnnnnnnnnnnnnnnnnnnnnngcggccggcggtcctcccgaggatggcattccttctaagactaaggtcatggttgccaacctgccgtacgacttgaccgaggacaaggtgggttatatctattcctttcgtctgatctccgtctggggttacattgactgacatccttttctccatttagctcaaggagatcttcgccgcctacgagcccgtctctgccaaggtcgccctgcgtcctatcccccgtttcatgatcaagaagttgcaggctcgcaacgagcgccgcaagactcgtggcttcggtttcgtcaaccttgcctccgaggagctccaggccaaggccgtcagcgagatgaacggcaaggacattgatggtcgtgtcatcgccgtgaaggtcgccatcgacagcccgggtaaggaagatgatgatattaacgctgtggctgagactgaggagactgctgctcctgcttctgatgctgcctctgctcctgctgctgctgctgctcctgctcctgctgctgatgctgatgcagctggtgcggctgatgctcccgctcctgctgctgccaaggagaacactgctccttccgtcaccactgaggcttaagtgccgcataaattgtactcgactgaacgaggtacttgttaattggctttaaggttgagaaacagaaggggactcaacggaggatcgtatcgatatgaccatagtgctctgcaaaccacagatcattgtgaatatcttagctactcaacgattgcgggagaaatggggagaaccctggtggggttggattcatgactttatcggacaacatggatcagccgaccatgcgagggagccatcttagctgatgtgctcttcgtccttaacgactttcttttttttttttcttcgccttctgtattgtacctttagcacacatttactaaatgatgacgatctccacctggcgtattcgatttaagagtaattcctgtacacctatactatagacatgcggtctacggagtatacaagtggttgtgcccgatttggagatgacgcgaagtccgatccttgccgatcagaggcaaaacatagaatttgtattctttcaattctttccagttgattttcattctctcgagccagttccattagctttgtgtcttcagtgtctttcagtctccgcacaactccatcgaaacgagaaaaaggggtaaattattcaacatcggtgccgcctcggtcaaccctacaacatcctagcgcacaccattatttagattgcgtccctcaacgtctcaccgtcggcattgtatattcacccactatgtcgcgcatgtgggaagtcgacccggaaacgaggacaaaggtgtgccaggtcaattccacaacgcgccatggtcactgacacaaccatgtgccacagctcctccaaatctccaagacgaacggaaatgacaagtgctgcgattgcggtgccccatcgcctcaatgggtattctttatcccttcctcttgcctattgccctgatattgtcttcgagaagctttatcatccccaacaacccatacacacctcacaaaccacacaccctgctaactctttgcttgtcattggcacatcaactaggcctccccgaagttcggaacattcatctgccttaactgcgccggcacacatcgcgggctaggcgtacacatctcatttgtccgttcgatcacaatggacgccttcaaacactccgagatccaacgcatggagctaggaggcaacgagccctggaagtccttctacgatgaacacccagtcaccgtctccgaaggccgcacattcgaagactccacgattaaggaacgatacgatagcgacgagggcgaggaatggaaggagcgcttatcgtgcaaagccgacggccgcgagtacgtccagggccaggagaagaagaataatgccccctcgcgctcgaacacaacttcgaaattgaccggcacgactgtcgctggtgccggtgctgtcgctggcggccgggctggatcgcctgcggcctcatccatccgctccggtgacagcttgcggggtgtgccaggcaagaaggagcagaacgaggcttactttgcgaagctggggaatgaaaatgctactcgcgtcgatagtctgccgccctcgcagggtgggaagtttactggtttcgggggtggtatgcctgcgcccgccgcgagtgatcggcgcacctcgccctttggcggatttggaggttggggtgttgggggtggaggtggaggtggaggtggtcagccgttcgaagatcttcaaaaagacccgttgggcacgatcactaaaggacttggatggttcacgtctacggttggcaagagcgcaaaacaggttaatgatgcttatctacagcccacggctaaacaggtgtgttgcacgacctcgcttgagagcagttataggtgtctatagcttcttccgatgcaattactgacatgaattacccagctggccgaatccgagttcgcggcccaggcccgcctccatgctgcaacactcggccagggcctgcagacaggcgtccgcggcgctgccgaccagttcaataagtttgtcgaaggagaggatggacgcggtgacggacgccggaatcgcgtggagcctgagcgccgagacttctgggacgacttcgcctcaatgggcgaccaagagacacctagccatcgccgtagcgcatcacaacggtctcaacggtctcagcggtccgacgttgttggtaccgctgccatgcgcaagagccccactgcctcctcgttgggtcactctacgcctggtttgtctggtgaagccggagagggtaagaatactacggcttcggcgacgggtaaaggaaaggatgaatgggatgacaactggtagcatataagcgctctattttactgttctctgtttgtttgtgggccgttgttatggtgccatgactttatgtctctatctgcactacacatatatcttggtagaatctccctctttcgcaaagggaagatcagatgcatagtccataatacttcatattagcttgacatggtgtcaatcggggaggtgtgagaaaaagggtggcagaaagtagaataatattggtacagtgatgagatactatgagattgtgataatatacaagaaagtttctactgaatcagcctctcagttccgcaagcacggccttctgtctctgaccagacatcttctcaaaccggtcaacactcatgacaaaagtaccgcggccagcagtcaagctccgcaaatgcttgagatacccaaccatctccttgagcggcacctttgcgacaattgtgcgcgggcgagtcgcagcagcagggatctccacgccaatagaagccgtctcgaacggatcaggcggcgcgtaaacacggctgtggtcaatgggcggcaatgcctcttcttccagtgcagacgcagaagtcgcgtccgtgcctgatagcggtacctcctcgtcaagtgagatgatatgtccacctcgtgaggaggaaatgtcgtgcacgacggagccgagactcgcctcgtcaatgctgataatcacatccatcaccggctccatcattactgtccccgcgccgagctgtacatccttcaacgccgcagcggtggcttggcgtgcggcggatgagagggccgaggtggttgtttcgttgccgaagaggtcggcggccgggttgatagttagtgtgacgcgggtgttatgcattgggaaggtgaattgaggcccccgggcgagcgccgccacggctccgttttgcagcgctgtgcggaacgcgacgaggtccatgcctggtgggagcaatgggctagtttcttcttcgccacgcgatgactggtcaatttggagaccgggggcgcggatgatgatctggttgccgtcgtaggtttcggcgaggagcgtggcttggtctagctcttgggactcgaggtcttcgtccagtggctccacgactgctgtgcagcctgctttacccttccgtccggcgatctccttgtcgaagatcttggttattgggctggaggtaccaagtacggattcgcgatagccgatctcgatgcggcccattgtggccttggctttgagatcgttgattagccggtcacgggcaatttcgagatgcaactcccccatgccgcttagaagcgtctggcctgactcttcgtctatgttgacgtggagactggggtcttcacggaggaggagtgcgagcgattctttcatgcgcttctcctcgcttaggctgtgcggctcaacgctggtaaagaataccggtggtggaacagcaataggtcggagttggagactggtaagcggctccgggggagtagctttgttccctgcgtaggacacgagggtatcgcctgtccgggtgtgtttgagcccgactacgactccgatgtgtccggcagcgatcgagtccacttccacggcatcgttggcgtacatcttcagcagacgtggggcacgctcggagagctgcaggtttgtgttgaatagaaggctgttgcgatccaacgagccagaatatactcgtacgtagactagaactccgcgctttgcgtcgttgaccactttgaatgccagtgcacagctttgaagcttgctaatcgcatcttttgagctggtctgcaaggccaagttctttttcttcggttgtttccctttcggttgcgcggatgccttctcgctctgctccacaattaagtctccggacagcaggtcccgaagacctcccttgacaccgccaatactcacttctgggtcgggagcttcgggcggacttgggagaagattcacgatggaatctagtaatggctgaactcccatgttccggaaactggcacctgcgaatagagggacaatttgactccgctggtccaacacgcaccggcgcaagctctcaatgatatcagctggcgagacggcgagatgatcttcttcacactcaaagaatttctcaacaatgtcttcatcatgctcactgagcagctcgaccaatgcaattcgtgcgcgccgcagctctgcggccagagccggctcttctgcctctaattgctgaaggtcggccacttttacattgcggccatcctcgccttccttccatcgtagtccttggagatggattgcatctgctacccctataaaggggccattgcctccttggaaccacggtatctggcagaccgctggatagacacccaagcgagtgctgacttctcgcaccgtcctaccaaatgcggccccgtcgcgatctagcttattcacaaaaatgagtcgaggaatgcgataggtgcttgcctgattccagaccttctccgtctgcgcttcgacaccggcaacaccatccaatatgcagacggcgccgtcgaggatgcgcagagatcgcatgacttcaaatgtaaagtctgcgtggccaggggtatcaatcaaattgatagtatgcgggtaagtagaccgcggggtttgctcattctgcgccccagcttgggggcctgacgctccatttacctctccgggaggccaatggaaggtaatagcggccgactggatagtgataccgcgtgcacgctcggcgggaaggaaatcagtcactgttgagccttcatccacatcgccaatgcgccgtgtaaagccactgtagaataacatgcgttcggtagtggtagtcttgcctgcatcgatatgggcgataatgccgatgttccgggtccggtccagagtctcatcctggcatgcagatgtcgtggaaaagcgttgaagctgtgtgtaatttgaccgaagacccttgagggaggaatatgcatttttccacgtcccattgctcggtgtcttatatagattggagctcatacagcgcaccccggagggaaagcgcaacaacggagcgacgaccattccaaggggaaacgctcatgtaataagggacagaagatgaaaaattaggttggaattggcattgggctgtatgatattgttattgatacaatagaagatcaagctctagagcgaagaaatcggaccacaaagcggactggggatcgccaggcttggcgcacgcattcctcaatgcgtgacttgactccgacactacctacctctcctcaactactcagatccttttgctcatacccttgctgtttatttgctgtctttgttatgccaattcaacgggtctcatctattctctccgtttgaagctgcacgaggtaggtctttgagtgcctggaagctgaccattactgtgggggtccgatcttcagccgtttaatactgacgcctgccatgaccagccactcccccttgtcagcgattatactccttacgccgaccttcaactaagatggactactctaccatctctaccgacccggatcatcctgtcggtacctcgccctggggatcaccgcatgttgagcgaggcgccttccccacttccagcaatgacatcccgtcgtcccctttacccggccaggagcaatcggcggacgttggtagtagtcacaatggagaaccccaatctccagacctctctgcgcagctgcagagcgcgcaattaggagacccggactatcccgaggagccattcagcgcgcaccagccttcaaacagccagcaacaactatctcctactctcgcacaatttcagaccggagcacgagacacacggccccccgctcccgcctatagaatccaaggaaaggtcactggtctggagaggacggggaagaaagacccaatcctgcgtttcgacatccacgtaggtctgcccctgggagtatttgcgcctgtgccatggctaattcccgatttttctttgagatcagaccaatattcccaaattccgcacgacccagtaccgtgatgtgcgtcggacccattccgaatttgtcaagctcgcagaccatctaatttccgccaacccggaagctctggtccctgctgtgccatcgccagtgacgccggccggcgccggcaccgaggaggatgagattcgcatcaaatcggcgatgcagagatggctcaatgttgtgctaagcaatgaaattctcattcaagacgacgaggttgtgcttttcgtggaaagcgacttcggctatagccccgtactgcggatgaagcagccggcaacgggcgtgcgacgaaagatgttgaagcagtttgcgccgcctccagatgacacacccgagttgcaagctgctcgcccaattgcgaagatgttttacttggcatcaatggatacgagccacaaggtcgaccgagttgtcaaggcccgtcgtggtacgttatcggagttttaaactgttttggtcgcatattttgttccgattaaaactgacaattttttagggcttggattggctgaagccgatttcggcgtgaagctcggtcagatgagcgtacaggagactcatcccggcttgggcgccgcttaccgtaaacttggcaagattgttcagacagttggcgactaccacgctgttcaggccaccgcggaggctaccactctcggcgaaccgttgagttaccactcttcagacgcctttattgtgaaggaaaccctcaccaaccgccatattcttctgcgtgatctactccaggcccaacaaagtgcacggagcaaacgtgccgcagcagaccgcttgaaggttagctcatcggtgcgtccggacaaggtagatgaagcgatcaacgctcttgaggaggcccaaaaccatgaagattacttgaccaagcggacccagcgtgtcacgtcaaaccttctccaggagaagcgccgctggtttgaccgcaccacccaggatcttttatccagcctacgtgagtacactctccgccagatcgaagctgagcgccgtactctggccactttggagagtgtccgacccgacattcgtgccattgacgcttccggtggtcttagccggctgggtcgcgaatcccacccagcgatgcgccggccaaacatggcttcgagccagggccctaagggtgattcgtggagcggtgttcctcgccgcaatgacaacattggacgcagcatgagtggcagctttactgccccctcgctccctgacgatgatgatgaggagagctctaataaaggacgcaaccgagcttccagtcaggttgggtcgattgcggaggaagacgatgaccgtcttgatgcgcgaaatgcagccagcagattggccaccagcacgttctgatcgtattttgggacgcaacgagtctgtacatgtagccccggcacgaactagtgattcccctttgttcctcttataacttttcgtgtcctcctgttatgttatctcctatgcacaatcagtatccttttcaaaattgattatagttgcaattgttctatatgactttctaaatgcatggtgattaggttccctgcaccaacatgaggcctctcgaatgatatcaagtcatcaatactacaacttctcatattccccccacttatcccacttcttcgtcccatccccctcaggtaattcaaaccaagacgccttctcactaagaaagatatgatggcttggcagcgggatctttgtcttctcctcgtcgagggtccccgcagcgattccgatactcttcggatcacgatgcaggagcatactgagagtcgaaccgcatttgggacagaaggtacgcgtagcggcctgggttgcctgtcgctctgtgggactgacatgccatcggatatcgtcagtcgcaaagaatgcccaggtttgatagggtgcgccggcttgtttgcggcaggttgtgcagtggcagtttaccaggcaggttgggggagtggaggccgtgtagccgatgtaattacaagcgcagctgccggaagccattctcggtacttggatgttggaaattgcaggattgcgaaggtaatcgcgattctgacatcatgtggggtatcgaagctctacatataccaaatgggcatggacgtgtccctctataattagccactttgtacgaattacagagttgatttccaatctgtacaacatcccctcatcgtcccccacttggtgctcgggccatatttgatttccaagcgtctcaacttccgatcatacttgcttcacttatttctatctgcgaaatctttttcttcttcattttccaattccaccatgtctcccaaggttttcgtgtaagtcattccggtgtaaaccgagcactcaatctaacgagtcctcacaggactggcgcaactggctacatcggcggcgacggtctgtttgttattgctaacgcccatcctgattggcaattctcagccctagtccgtagcgaggaaaagtccaaacaggtcaccagccaacacccgcagattcggactgtgatcggtgatctagactcgtccgagctgatcgaagaggaagtcaagaacgcagacattgtcttccgtacgtttattcaaacttatatatcaggatatcatgtcactaataacatatacacagacttcgctaattgcgatcatgttgccgcagctaaggccattgccaagggcgctcagcaccataccgccgagcgtccattgtggctgattcacacctctggcactggtatattgacaatcgaggaccagcgcgctggcacatacggcattgagcggcctaagcagtacaacgactgggagggcgtcagtgagctagtcaacctcccatcagacgccttccaccgtaacgtggatgagatcatcctcggggttggtgagcagaccccggccagtgtgaaggtcgcagtcgtatgcccacctaccatctacggtcttggccgtggccctggtaacacgaagagtatccaagcctatctgctcggcgctgcggtgctgaagcgcaagcggggcttcctggttggaaaaggcgagaacgtctggcaccaggtccatgtccatgatctgagcaatgtctacctggctctgggcgaggcagcctcggtgggaggtggcaaggctacctggaataacgagggctactacctcgctgagaatggatcctttgtatggggtgatatcgagcgtgcagttgcacaggctgcttttgataagaagcttattccttctcctgatgttgagtctctcgatggcgctcagacgactgaggtactttctgttggtacctatgcctggggctctaactcccgtggcaactcaatccgtgcacacaagctctttggctggacacctcagaagcctaagctgattgatctcgttcctgagattgttgaggtagaggctaaggctcttggcttgctgtgaactcggtcttatgttaattcgtgaaaacactatgaaattgacgtattaaagagcacaatgtttgagacctttgaattaggatatgcaaattgcaatgtagtccagtgttgttttgatgtgttattcctttcttcgatgtttttgaaaggtgtggggaacattttaacactaggccacaacaaaaacctcgcttcctgtttaggccatattcgcagttcgacaaaaagaagaaaaagaggcaaaatagaatcgtcagcactaggactcgaacctaggttcacgaatgaactacttgacggaaggatcataaaagaagccgttcgaaagtagcgccttaaccactcggccatactgacttgataagaaaattggcaatcttgtgcctactagcggctgcacttgacctcttagtagggttagacgcctaagacctcctgccaagaattcaggtgtttaatgtcagtaacatctgctggtgaagtatccgctagacttaagagaaacccgacatagttatgcagaccacgtgcgggccttattcaatataaacaatgttacaatatttacccatatggcaatatgaacaatgacctattcacctgttcagctaattattcactctcatttaacggcttaatcaattgtagcttctattgttcctttaattgaagagctaggtcattattgaagagcttgaatggtaatcaataataaatcaataaggcacacatgaactcttggcgggggcctcaggcgtctagccctctggaggaagctttgaccatcagcatcttctgtcttcaccttacacgcctttggcttctgcgaccaccttgtactcaacggaatatctttgctggtacgcttgatatgcgcattatttcccttctttacttatcccccttcattcgccgcgggcgcttacattcattcttccgggctcctacagaaacgactgcatgagttgcaacctttcagcgtccagttccaccgtcgtaacccctcgtgtctaacacggctacctatcatggcgcctgggtacggacatggtggcaagcggaaacgcatcgatcgctcatggtccggcgagtcagggagcaatgacctgcgaccttcaccccatcgccctgggactctcaatatggcacatcaccctaccaatcctggacatcaatcccccactcctcgagagcagaatgacacacgcgacagatctcgtcgacaatcgcaccgcaaccgggctggttcccgccgcggatcccacgatggtcagaatttttcgaattcgcagcacagagaaccgaacgcgatgtctcctcccgcaataaatcagcccagggaacttgccgaccccgtgccgtataatggcgattcggccgcgtcaagacctaccccttctcccgcgccgaatactcctgctccgcagccgcaattcaacccgccgtctcgagctagctcagagactgtcaccccccacccctctctcccacccccgccttatgattacgaatatgtgaccgatagcgctgttgaggaatgggcatcagcgggcaaacaaaaggtagtcggagaagggactgcggctcgcctggaacaggatctggctcggcttgcatctgtctaccaggaacttattcactccgcgatctacggtcgactatcaccatcgcatgcgggaaatgctgtcaaaaatatcatcggtgaagaatctgtgtcccaggatgtggatatggatagtgggaagcctttgaccctaggaatcgatccgcgctccttgttcctcgatacgctttccatcgtgactgacgctgacccctcgaacgcggccctcaaaccacttgtatttgcgacaggtattgatccttctttaatgcgccttcagcttgaaactccgttgttgcagtccctagggctggttcgcgaaacctttgcgcgaatgggaattcgaaagcagaccaatctgctctaccgacagtccaactacaatcttcttcgggaagaatctgagggatactcgaaacttatcaccgagctattcaccacaagcaacaatgagccgccgtcgagtgaagtggtcatggatacatttgaaagagtcaaggctatgattggcgcatttgacatggatgtcggccgtgtgctagacgtcacgctggatgtgtttgctgcggttcttgtcaagcaataccgtttcttcgtgaagcttctgagggttagctcctggtggccgaaggaagaagccgtccacagactagagcaaggctatcgtcactccggtattccgaattgggcacttccagggtcaactggatggatcacaaccgacgaggaacgatccgctactatgcgcgcgaatgaggagcgtgacagccaattctgggatcgagtgagggaaatcggacttcaagccttcttcgagatcggccgcaaaccggtcccaggggtggaagtgcaacgcaatctttcggaaattaacggttcatcatttgaagaagatgccacacgatcatggctcgaagagactggcactatacccccgaagggcaaccgggttgcagcacagctgcttggtttcaaattgcgattctattcttcatccgctcgaaccaaagacgacgttcttcccgacaacctcatttaccttgccgccttgctcatcaaagttggctttatctctctgcgtgacctttatgctcacctctggcggtctgacgacaccatggagattctgaagaccgaaaaaatggcagaaaaagccgaaagagtgaaggctagccgaccaggtggcggaatcaacgctttgatgatggccggtgctttgtcggacgacacaatccctccttcccgcttgcgcgacgagccgcgagtggcgacccctagtaaagaccaagaatccgacaagggcaccgccaaaatggaaaacgagttgccagacccatcagacctgaaagtgctgctcctcaagagtctcctcgccattggcgccattcccgaatcccttttcatcatcagcaagttcccttggttgatggaggcttatcctgagctgcccgagttcatccaccgcatactccatcactctttgaagaaggtttacatccagttccgaccatcggtatctacaggtgactttcccggagctcaatacacggtgacttctgatcagaacaatgcgaagggccagatcggactcacgcccccaccttcgagacgagtactgcgatgggctcaactagataaagaagacaccaacgatggcaccgattaccgattctactgggatgattgggccgacaacatccccatttgtcaatctgtcgacgatgtttttgctctttgctcatctttcctcaacctttctggtcacaagattggacaagatgcgagccttctggcgaagcttgtacgcattggaaagggaagcttgatccaagacggatccgaagcgaacagaacacgttggcgcgatctttgcaagcgtctcctcctacccgctgtcagtcttacaaaagcaaatcctggtgtggtcaatgaagtttttgatctcatcagcttcttcccccgagatgtgcgatacaacatgtacgcagaatggtactcaggacagacgtcccggctgccagacatcaaggaggccttcgaccaggccagggcagagaccaaggacaccctcaagcgacttagcaagacaaatatccgacccatggcccgcgcattggccaagattgcttacgccaatcccggaattgtcattaatgtcgccatgagtcagattgagtcgtatgaaaatcttatcgaagttgtggttgaatgcgcacgctactttacttaccttggctatgacattctatcttggtccctcattaattcgcttggccagaaaggacgaagtcgggtccaggaaggtggactattgactagtcgatggttgaacgctctctccacattcgctggtcgaacttacaaacggtactcggtcatggaccctactccggtcctccagtatgtggtggagcaacttcggcacaacaactccaccgatctcattgtgctggagcaattgatcagctcaatggctggcatcatttcagacaacgacttcaatgatgctcaaattcaggccatggccggtggtgatgttctccaatcccagactatcttgcaactgctggataaacgtcatgagtcaaagaccacctccaaacggttgctcaagtcgttgacccacaccagaatcgccggtcaactgttggtcgccattgcccaagaacgactgacttgtgtgtacaatgaaacctcctcggagcttaaattgctcggcaatatctttgacgaaatccaccgaattctcactcaatacctcgacttacttcgcagcaatctctcggttgatgaatttgattcctttgttccggacttttcttctctcgtcacggagtttggaattcagcccgaaattgccttctggattcggcggcccagcatcgctcggaaaatcaacgacattgaagaatcaaaacaagagaaagaacgttcagtctctgtatcgaagtcgaacggcgaccacaagatggatactaccgaggacgaagaaaaacccacgaagtccgagactccggcagacagtgccatggatgtcgataaggacgaaactactccgaccgaaggacccgatgctatccttgcttccgcggtcaatgccgagccattggcagccaatcctgtcatgcaagatttgattgacgatgtcaagtctgctcttcctgctgagacatgggggaccatcggagcacacttctatgcaacattctggcagcttgccctctatgatgttcatattccgcagaaatcctacgaggatgaaattgacagactcaagcggcgagttgtctctatcaacagtgaccgatctgatcttagcgtggcgggcacggcacgaaaggagcacttgaagcgccagattactcagctacaggagcgtattctagatgagaataagaatcacctgaaggcgtatggacatacacgctctcggttgcagaaagagaaagacaagtggttcgccggcatgcgcctcaagcatgactctctcaatgttgccctgttggagcaatgcttcattcctaggcttctattgtcccctcttgatgcattcttctccttcaagatgttaaaattcctgcacagctctgggacccctaatttccggaccgttggtctccttgaccagcttttccgcgagcagagactcactgctctcattttcttgtgcacatccaaagaagcggacaatcttggtcgtttcttgaacgagatcttgcgtgatcttactagatggcatgccgataaggcagtttacgagaaagaggcattcggtgccaagagagaccttcctggcttcgcgaaaaacgtcgatcccgaaggtgttccagtgatgtttttggaattcgaagacttccggcgtctgttgtacaaatggcaccgcttgttctccaacgcgctgaagagctgtctcagcagtggtgaatacatgcatattcgaaatgccatcagtgtgctcaaggctgttgtgaagcatttccccgctgtaaactggattggtcggaacatcctgaactgtgtcgaccacctgagcaagaatgacgagcgagacgatgtgaagattcccgctgcttctctgatcggtgacctcaaccggcgcgagaagaagtggatgctgccacaggctttctattttgcggcagctcagcctggttctcagccacctggcgacgcatctggaacgcccgggactcctcaatctgctacaacagcgttgaatgcctcagccccagagttcaaccctactggatcctcaatgtaagtgacagccttgaccatttcgacatgctcacaatgactaatctttccatctttagctccgataatattgccaagcaggaacagtctggcaagactgaagtcgaggatggtgaaattgaggatgcgaaaatgaccgatgtcggtacaggcaagggcgtcgaagccaggcggaccggaaccccctctcaggccggatctaccacgccgtccatgctcactggggaagaggctacatccggtgaacagccccctgtgcgatctcgaccaaattctcgtgccccgacttcatcccgtcagcctgatatccccaaaagacccgatattcgccaacaagttcatcctcccgttcgtcccccgccacgacacagcgatggaagactgcctccccgccccgagggattggatgaccgacgagagagacatcctgactttggaccccgcggtcgtcatggcccagatcataaccgctcctttgatggttctctaggcgatgtgcgaggacgtctcaatgagcatctcaatgaacgtgatcgtgaattccccatgagacctgcggctgatgatcttatgcggggaccacctcgtgattctcgttctactcgcgagaatggttggcctatggataggcctggtcgcatgcgtgggcccggacccaatgattcgttccatggacgtgatccctctgtgcgaggagagctgatgcctgaccacatggaccgcccagtcgatattcctcgacgtggagattcgtctagaccagagaaagacgatcgcaggccctatccgccacgccctctatcgccccctagacctgttgacctgccaaaccgccccgaccgattccccccacccgatgatcgcagacctgccgggtttaccccgtcctcccgtattgatgatctccccaggggccctcgcacggatcgacaacctgatccgagggacgctgcaccaggtcctgatatgactcatggtcggcttcggcagccggaacctccgtctgagattcctgccggcccccgaagacgcggtggacgcaatatgtctggacaggcacctccaatgctcagttcaagcaatgctaccttacctgctccggaacgccagacacctacgggccctgcccgacaaagtgggcgtggggcacccgagcaacccgctcctccaagccaaccagcgggctcaagcactgccccgggtattcacccagatcgccttagaaatcttgtcaatgaacctgcagcccccgctgctgctccatcgggtcctcgcggattaggcccacaacaaccacctcggggaccctctgctcagtctgggcagtctgggcagtccgggcagtctggaccgcctggaccgcctggacaaggcttcggtggggagcgtggccgtggtgataaacgtttcgcaggcctcaacaatgtgctccagcagtctggtggtggcagtggtgaccggggtgggaacactcctgttcgtggaagaggcgccaatcgcccaccaagcaccatggaggcaccatctcctcagcctgcgaaccgcccacccatgggtcctgcgggacctcaagaagatcaatcccgtaaccgatccaacggtggccgaggtggcgacctgcttgatgatgccgttcccgaggcgggtcgctctggatcaactggaaatcgcacccgtgaaacagagcctactcgcgagaaagaacccgagcgccgtgagggcagcagcaatggtcgcaatcgacgcgatggccgtcgaaatgaccgtgaacgcagccgtcgaagcgatgtaggaggtggcggaagccgcgacgacaagggcactggcgagccccgtgagactctgcgccgagcccagagctcacgcgaagagctgcgacgccgagaccgacgtgaccgcccagatggaccgccaggaataactggaccaacacctagcagtgagacccatgatgaaggccgtgtgcgacccacgtcctctatggaggcaccgccaccaccccctcctcctccacctccgcccatgccggaaggaaacgagcgtcgtttcaatactggcgaacggggtagccggtccgacaatcgggatcgtgagcgcgagcgccgtggcgaccgacgtgaccgggatcaccagcgtgagggtggtagctctgggggctctgggcaccgtaagcgtggtcgacagggccctgacgatggcactgacggtggacgcggcatgagaatgggaaatgataacaagcgtcctcgccgaggagcgtgatcctcaccatttaccatgataccccattgaaaggaatggaatttgcttttttttatgttcttttgctacaaacctcaagttcctctacactggactttctactgtttcctatcttgactttgcattttgcgtggtgtttggggaccaaccacttcacttcttcacatgtactttttcttcttcttctaaatgaacgtaactgaaatgcaatatccaaagatcttccatgattaataatttctttccatgtccgaggttctccgtactccgtctctcgtctctccaggctcagcggtccaatatccgacgtgccccgccctaccgtcagtcgggtaaacttcggttcgcaactacctccgtgcccctttgagagagttctcttgagagagcgagtggatgatcagccctaacatcttggaatatcatttgttcaagtcctggtatcatatatgtagccattgtcattggatacgattccacagcttccccgcctacacgggctggtttcacaatccgacgcttcatacattgaaggcctgaactctttagttttgcgtataaaagattgattctgttcttattcttcttttttctttttggacaacgagtgtatcacttctctgtcttcggagattaacaacctcgagcttattggacgcttcattctcccttgcagttgaacaagagcacaagcaattaatatacccccaaaagagaaaagagagctgctacatcatgcctcgaatcgacgttgagaaagccatcgaggagctcaccctcggcgagaaggtggccctcacagccggtaaacctgcttcctattgccaaagatccaattcaaactaacctcaccttaggccgtgacttctggcacacacatcctatcccacgcctaaacatcccctcgctacgcatgtccgacggaccaaatggcgtccgaggcacccgcttcttcaacggcatcccagccgcctgctttccgtgcgccaccgcgctcggcgcaacctgggataccgagctcctctcagaagtcggcgcactaatgggcgaagaagcgatcgcaaaaggcgcgcacatcgtgctaggcccgacgatcaacacccaccgctcgccgctgggtgggcgcggcttcgagtctttctcggaggatggtgtgctctccggcacgctcgctggccacttctgcaaggcgatgcaggagaagggtgttgcggctacgcttaagcactttgtctgcaatgaccaggagcatgagcgcatggctgttagcagtattgttactaaccgggcgctgcgggagatttatctcatgccgtttcagctggcgatgcgcatttgtcgcgcgcagtgtgttatgacgtcttataataaggttaatgggattcatgttagtgaggataaggctcttattgatgatatcttgcgcaaggagtgggggtgggagggtcttgttatgagtgactggtgagttacgatgggttcattctgttatttcggatgctcacgtttgatttttaattgtaggtttggtacatacagtacctcggatgctatcatcgccggtctggatatcgagatgcccggtaagacccgctggcgtggtgatgctcttgcgcacgccctctctgcaaacaaagtggcccaataccagctcgatgaacgagtgcgcaatatcctcaacctggtgaactgggttgaacccctgggaatccccgagggagcacctgagaaggctctcaaccggccacaagaccaggctctgttgcgccgcgctgctgccgagtctgtcgtgcttatgaagaatgagggtgatattcttccccttaagaaagatgggtctctgctggtcattggacccaacgctaaaattgctgcgtactgtggtggtggctcagcctctttggctccgtactacactgtcacgccgttcgctggcgtctctgccaagtccaagggagaggtcaagtacagccagggcgtgtactcccacaaggacctgccgcttctgggtccactgctgaagacggcagacggcaagcccggcttcacattcaaggtctacaatgaacaccccgactctggagaagaccgagaggccgtggacgagctgcatctactcgaatcctccggcttcctaatggactacgtcaaccctcggatcaagtcgatgacctactacgtcgacatggagggaacattcacgcccgaagagagcggagtctacgacttcggcgtgacagtcgtcggcaccggccaactcctcatcgacggcgaattagtcgtcgacaacaccaagaaccaaaagcaaggctccgccttcttcggcacagccacgatcgaagaaatcggcaccaaagagctcaaagccggccaaacatacaacatcctcttccaattcggcagcgcgccaacctccgacctagacacgcacggaatcgtcgccttcggcccaggcggcttccgcttcggcgccagccgccaagtaagccaagaagaactaatcgccaacgccgtcgagcaagccaaaaccgccgatgaagtcgtcatcttcgccggcctcacccaagaatgggagaccgaaggccacgaccgcgaacacatggacctacccccaggcagcgacgagctgatcagccgcgtgctagcggtgcacccggacaccgtcgtcgtgatccagtccggcacgccggtcaccatgccctgggaacacaataccaaagccctcgtgcaggcctggttcggcggcaacgagtgcggaaacggcatcgcggacgtcctctacggcgacgtgaacccctccgccaagctgccgctcacgttcccgcgccttctacgcgataacccctcgtacctgaacttccggtctgagcgcggccgcgtcctctacggcgaggacatctacgtcgggtaccggttctacgagaagagcgatgtggtgccgggcttcgcgttcggacatggtctttcgtacacgagtttcacgcgcgaggatctgcatatcgacactgttcctgaacagagtaagtatgcggagtctggggaaccggtgactgcgtccgtgacggtctctaatacgggtgaggtggccggcgccgagatcgtgcagctctggatcgtgccgccggagacgggtgttggtcgtccggtgcgcgagcttaaggctttccagaaggttttcttgcggcctggtgagaggaagacggtgcagttggttgttgagaagaagttggctacgagctggtgggatgaggagcgggagcagtggatttcggagaaggggacgtatcaggttcttattacggggactggcgctgaggaactgcgtggtgagtttgaagttgggaagacgaggttctggctgggtctgtagggctgtggtatttttgtttgtgtttgtcgttataagaccatgtctcacgagtgatgttatttttaatctgtggatgggctaggttggcttggcatatggtcatacgagattttaatccacatgtttcggtattttgaattggattttctattttattgtggacttcagaaaaagtgaagcagacctagtgtttaagtagaaagtgggtggtgcaggctagagagcgatgcaatggttgggttgaaatgaacataactgacatgaagctgcgaaataaagtaacaaaatacatgaacatccccagaaaccagcaatagatatgataaatggtacaagaacaagaaaagacaagggtatctacatagaacagaatagacacctaatatcaaaagccacgaatacgcctcagggcaaaggaatcaaaaaaaacacctcaaatccctgcaatgcatattgacaccacaaacctcatgacctgctgccatcaataaactcattcccattgtcattatccttcttcctccctagcccagccaacttcctcagcaagagcgaagccttgttccgccggttgtttttcggagaaccgggcatagcaacagagtaaatacgctcctggtacatatcatctgccaagcaagaagacgagtaagacatgccacggttgggatcggcaaacggtggatataagtatccgccaggggaatcttcctcattcgtcgaagcactgcccaatctcgagatacctgtttcgggtctcgacaatgtctctcttccagagcctagtagcgaatccggtgtgactttgccgtggacattcaggtcctgttcctcccaataatccttcggcggccattcacgggagcgtaatgaccctgttgttcggttgcaggaactgtagaagcgcgccattggctttgcctgtttggcttcggttggcgcattttcgtcgatgagacaggggatgtctccgctcacgtgaagccaggttcggcctgtccagccgagaggtgcttcgtgtggggagatggccggggagaatgtctcggggatcgcatttgtgtcggtggcaatctcgtgtggatgtgtcttgagctcggactcggtgacttcgaatcttttgtcggtgtcattgagcgagctgactgggctgtggagtgttgtgggcttggatgtccatgtccactcgctgttcatttggagaggactgtagaatggaatcaagcttggagagcaagctcgccccctttccttatcttcgattgttacttctaggctctggccccgggagcgggtccctggtgatgggctatgtggcggtgaggcagagggttgtttgttatagaaccgtgctgaaatgttggtgcccgacacgctgttgcccgacggtctccttttttgactgggcgaattgatcataccaacgccggaatcatgtctcttggtgctgtccgcttggagattgatcgccgacagaagaacgacatgctgttttagagatgaaggagctgcgtcgacactgggctggggattttgtccgactgtcacggcgctccgataagacaatccagctggcattccacggtcaatgctgtgggatagcatagcgcatgcatgcttgatatcatcttcgaggtcttcttcgatctcttggcggtcgataaacggtgatgcaggacggaagtagcccggctcatctgtgaaactgtagcccccggagggaccagggtccctgtgccatgtgggctcggcgtgggtgggagactcggggtttgttgctgaccggggacgactgctgggtgggctgacttcaatgggcgagaccagtgttggttccagagcccgcgcggagttgcttctggtgaaggtcagacggtggcgtatttgagatgcttttgctgatagcttgcgttccatctcgtaacggtttgtctttgtttgtgtctgatggtcaagcaaacaatgaaaacgaaagagagatagaggaaagtgcgccgacaatcagtgaaaatggccactgattccagggcagtccactgcagcccaaacgactggctcagatcagatccaggcaatttccaaactatgtgaggtcgtaagagggaaaattcaagaaccgttgtcggcacaactgtctggtatgcggggggaggggaatgcagagcaggaacatagtagaagagagaccctgggaatacgagataataagaaagaaaagggaaagatagtgatcttactagtagttctgcacagaactatcgtccacttagataacactcgatatcccctttcgggcctcgttcctgatttctacacaataaaattggaaaatctaagacattcctatccaaagctatctagttcacccggctaaaccagttagataggttaataacgcccatatcgaaaagggtctaagcgcccagtacacatgtagttagagcagcgtgctagtgtgactcaaatcgaggactttttgcgccagtgacatctagacgagtcttcgcagcagttaattacttgaaccacggtttatcagaaacatggcctatagaccaggtgtatattaggtacaacatagcctgcgtacctgaatccaaccgtaattaatagcattaacagcagaataacaaaagagcagagcagaataccctgggccctgaaaagccccgggccgccacctaatcttgtttctgaccattcagctcgggccaagttatcttcgccctggagctacggagttgcggatctacgtacttttgtccaggtcatcttctttgtcttcttttctgatttatttttctaaataatgcgtgcatgtagagataaccaatggctatcaataccgaaaacggacccatcactccccgaggtatcctcccgggggaaattgacccggtgggtcggatggagagcagttggatgcttctttgacagtcttctcggacaaggacaattaccaagtgagagacgggagaggcagttggatgctcatctccctaactggcggaatggaaaaaagaacggcaaccctacttcccctgcgccacgacatctatccggtcgcggacccctgcacgggattctggacccagttagagcatgggattggctgcagaaatcactgcgcctgacaatactttttttttttttcgccgctttaccaagcggtgatatcctccacctcggcctcgccgaaggtgctgctcttggtcagcttagtgacactggccacagcggcaccatcgcctgacttggccatgatatcgggcaggacttcgtggaagaattcgacgatgtggcggttgacttgctcaaattgaagcaggaacgcgtcgtggccctcggggctatcgatgcgacggaggcgagaattggggatgccagctgcaacctcttcttgttccgcgaaggtgaacagaccatccgactcgataccgataacaagagctggctgctctacgcgtccgagcgcctcagctacagtatcctcagtgtcggcgctggaattgccgcgccggcgggacacgtcatgcgtgtcgagcttgcgggtcatggcgatgtagcagttggcatcgaatcgcttgacgaatttgtcaccctggtaacgaaggtatgactgtgcagagaagtaggtcggaggacgaggacggccggatgcagtcagcttgggcttttcgtcgacctcaggggcgaatgttttggtgccagagaattgcgggtccatgaactggacatcggccttgtttgcaggagccggtgagccttgtctgctctccgaacgtgaagttgtcccgccacggtgtccgtcgttgtggatggcccagtgctcgttcgggggagtggggagcctctcggtgccgttgatgttccgcggcttggttggatccggtacattgcgaccgaaccgagactcgaatgaattgcggctacggtaagtgaggagtgctgacatgcgagcggcaccgaggccggtggctggcggatcgttgaacgcatagtagccatcgtcatacttcgggtcactgtagatgctctgtcgctgtgcctcgccccaactaatgcaccacgcggaatgacgcgccgaagtcgcaatgggcacaatagctcgcacatagtctttgccgaaaaatgcgtattccaaggtgagcattccacccatggatcctccaaccaccgcagcaatctgcttaacaccgaggtcgtccagcacgagtttgtggatgttgacatcgtcacggacagtcgttaaggggaactcgggtccatagtagccattttcaggcttaccatccttgtaggtcacagcacttgcactcccgtacgggctgcccagactgttaaggcagatcacgaagaaccgggagacatcgaatgcttggccaggaccaccaagaagaggaccccaccagtcagcgacatcggcactgccactaagagcgtgacagatcaccagcacattggcgccattaggagcgagtgttccgcgagtggtgtatgcgaccgggacattatgaagggtaacaccggattcaagtttgaaggacgggatgatcgcaatggattgatcctcgatcaactgggcataagggttctcaggttgcgaatcgactctctctacgggatttagtagcggttcattgggaagaattgggagggatagagtggaggatagactgacggtattgcgcagtagaagcactgctagtatcagccattgtgaaagacaacaatttgcaaaatgaagaaaaacacgaattggaaaatgagaacaggctgtacttgtaacaaaatcgagtgagtcaaaacccccgcgccttggaataacttggcttccggtcccgctggcagaaaataaagcggtatttagtcacgtgcgccacatcacgtgccactagggctcgctccacacttgaccttatttttcatctgtgcgaattctcttcctccgtagccaaccatccaacaaaccttcttacgagccaacccctcaaaacattcaaaatggtcaagactaagaagtccggtgacaccctctcctcgcgcctggcgcttgtgatgaagtctggcaagggtacgcagcttttctcgatcgcacaattgagcaatttgctaacattttctctcagttaccatgggtaccaagtccaccatgaagactctccgctctggcaaggccaagctggtcctcatctccggaaactgccctcctctgcgcaagtccgagcttgagtactacgccatgctcgccaagacccccgttcaccacttcaacggcaacaacgtacgttccattcccctttccttcgggtcggcagcctgaaaatggctgtcgcacctcggagtcagctacactactcagagaagaagtggtcaaaactaccacttcggagagtgaagttgctcagcgaagggattgccgaaaggtgtcccggagagcgaattggactaactcgccctatagattgagctcggtaccgcttgcggtaagctcttccgctgctccgccatggctatcctcgatgccggtgactccgacatcctgagccgtgaggcttaagcgtgtcgccctgttgcgagccataaaaatagaatcttgaaccattcttgaacaaaattttccacatgaataatgatgaatcacggatcttccaaactaggcatattctagacaagtgccaagatactggaccgcttgttaaatgcgcttgtcctcggactcgccatttcatagaaatagcctaaatgtaataccaaaaatgcattctattatcatgagtctggccgttcatgtctaaattagaccttatctataacacctatacggcttcgtggcgctgatctcgatcctaagaaatcagcattgatgtccgtgccagatcaatccccacgcaactccgcaatctttgcggggaagcactgtaagtacatacagcctgtattgcttggcttggacagaccactcatttagcctgaagttttccgaggaactatgtgccaccgacgagtctcccgatgttcacgagcagttccatataaaggaggaacttgatcttcagtgagtgatcaagtatgaccagaaactttggctacaatgcgtacacttctcttttttgtctccttgggctttgcagccgctgagaatggcctcaatggctggctgcggtacgcatcattaccctgttcaggccaatgtcattacaatctcccttccagtatcagcatcctcaatgcgactgagacaagtccggtgtatgttgcagggacggagttgcagaatggtctcaagggtatttatgggaagagtgtgcaagtcacacacaactgcaatatatcctcagtcgttgttggcacggttgatcaatatcgcaaaagctgtggcgctgtgaacagtgtacctgaactggaagaagatggcttttggctcgacacgaaagggggcaatgtccaaatccttggacaaaatgagagaggtgctctctatggcacctttgaatacttgtcgatgcttgctcagggaaacttctccaaggtcgcctatgcaaccaatccttctgcaccgattcgctgggtgaatcaatgggacaacatggatggaagaatcgaacgcggctatggcggcccctctatcttcttcaaggacggtcaaatcgtcgacgacctaacccgtgttgctggatacgcccgccttttggcctcgatcagaatcaatgctgtcgtcattaacaatgtcaatgcggatgctaccctcttgaatcccacaaacctcgacggggtggctcgaattgctgatgtcttccgtccatacggtatacaagttggtctatcgctcaatttcgcatcccctcagacttatggagggctcagcactttcgatcccctcgatacatctgtcatcgcgtggtggtcgaatattacgactcaaatctatgatctagttcctgacatggctgggtacctcgtcaaggctgactcggagggacagccaggcccccagacatataacaggaccctcgcagatgcagcgaatcttttcgccaaagaagtccagccctacggtggcattgtcatgtatcgtgcgtttgtctacaatcagctgaacgaatcagtctggacggatgatcgtgcgaaggctgccgtggaatttttcaaggatctagatggagagtttgacgacaacgtggtgatccagatcaaatacggccctatcgatttccagatccgtgagccagcatcggcattgtttgcaaatttgttcaataccagtatggccattgaactacaggttacgcaggaataccttgggcaacagtcgcatttggtctatattgctcctctttggaagaccatattagacaccgacctccgtgtcgaccaccagccatcattggttcgcgatatcgtggctggtaaacggttcaatcgcagactaggcggatcagcagctgttgtcaatgtaggcacaaacaccacctggcttggtagccacctgtccatgtcaaacctatatgcttatggtcgcttggcttggaacccggcagacgatgcccaggacattctgcaagactggatcagactgacctttgggctggaccgcaaggtactcggcaccatcactcggatgtcaatggaatcttggcctgcctacgaacaatacagtgggaatttgggcatccagaccttgacagatattctatacactcactacggtcccagccctgcctcccaagacaacaatggctggggccaatggacccgcgctgaccaaaccagcattggaatggatcggacggtggcaaacggcacaggtttttcaggccaatatccggatgaaatcgctgccatgtatgagaacatcgagaccaccccagacgatctcctactctggttccaccatgtgaaatacactcaccgtctgcactcgggcaagaccgttattcagcacttctacgacgagcactaccgcggagccgagactgcacagaccttccttacgcagtggaaatcgcttcatggcaaaattgatactgagcgatacaaccatgttcggcacttcctagactaccagagcggccactcgattgtatggagagatgcaatcaatgacttttattacaatctttctggaatccctgacgagtccaagcgggccggccatcacccgtggcgtatcgaagcggaagatatggagttagatggctacgaagcttacaccgtcagccccttcgaaacagcctcgggctcagttgcaattgttacaacttccaacaatacagctggcaccgcttcaaccaaaataaaatttccctctggcacctatgaccttgctgtgaattactacgatgtatacggcggccagtcacggtggaagatctatctgaatgatcacgaaatcggccaatgggttggtaatagtgaagatgtcttgagccacacaccttctatctatttagatggacattcggcgattcgtatcaagttccggggtgtcaagattcataagggtaataccttgaagattgtcggtatgcctaatggcactgagttcgcgccattggactatgtggctttgctgccagcgggtattgtagattagaagcactcttgtctaccttggctacttctctaagtgcagtgtttcatccaactaactactgtatgacaatcttctgaagaaaagtggtggtaatgaagcaggtagtgacacagtttatacaaagcaaataatgtaccacatgtgtaacattcaaaatctttctatccactagaagtactatgtagtctcagttgagataggaagcgaagccatcctcctgtaactatcaatgtcccttttctttctgtgcgtcttaaccgtatgaccgcaatgctagtttacttcagccgctggtttatcagtctgctatagatagtcgatttatgtgcttgaacaaacctatttggactttcttaaatctctctcaaatctctcagataggtcttatgtttcttgattgtttcaaatgattgagaggaacttatacgttgtagttgtccggttaaattgttcaatattgacgctagtccatatatggctagcgtcctacatcataggcgcgcatttccatttccatcgcgtccccatattcaatccctgcgctccaaccaattgtcttattccttctgaaataagcaactggtctcctctcatacaaagttgaattttcccatcgacctttgatacggagaatttgtcatcatgagtgactattcatcgttgaaagtggctgatttgaaggccgaatgcaagaggcgcggcgtctctcaggctggcctccgcctcaagcagcaattcattgacaaattgattgagcttgactcacagacaaaccaggttacaactgcagaaacaactccagcagaagaatccaccgcatcacagccatctgcgccggatgctgtttcgcaagcgacgtcgcagcccgaacaaccagagaacgaacagcttgaacaaggaaaggatgaatcaatctcacatattggtgaaataacagcacccgtttcagtgtcagagcaagctcaaaatggacacacgcaggcagatgagccgacccaagcagatgaagtttcggcagcagatgggaaatcgcaaaaagttgaagacgtcgcaaagcctgccgagacacaaacagagacaattagccctaaggatcacagtgttgcagccgcatcttcccagccaccaatggaagaagcaacccaagatgcgaagaacgaggaccctgcgaacgctcacgaaaaaccgatctccactgcccagacttctgagactgacacggcatctctcccagtagaagaggcattggaggatacacgcaaacggaaacgccgcagtcagagcccggctcctagtctagaggagattgcgaacaagaaggctcgcgcaaaggaaacaaccccccgcgcgttgctgaaagacgatgaggtgtctgcttctcgcgacgaggcgctcggcgatttgaagcctgaagaccagatttcaacagagaaccacacagacaagcaacctatcgagacccaaacagattcacacaaaactcccaccaagcaagatgctcggttccgcaacctatttgcacctaccagtgcatcctctcaactcacctctcccccgggagatattacaatgcaagatgtagaaataacccctgcgttgcaccctgcaacttctgccctctacatcgacggcctcatgcgcccactccagccgactgcactccgcaaacacctagccagcctcacttccacccccggaacccccgattccgatgatattattgatttctatcttgatgctatcaaaactcactgttttgtaagcttcaccagtatcgcggccgcctcgcgggttcgttccgccgtccaagggactgtgtggcccaacgagcgcaaccgcaagagccttcgagccgattttatccctgacgagaagatcaaggaatggattcagactgaagagaaatcccgagaccgcgctggcgctgctgcccgttgggaagtgagatatgagaccactgatgacggaactacggctaccctcgccgaggtgggctccactccctctggacgacgtgaatcaggtttcaatcgtactcctcccttgggcccgcgccgtgatatggaacaatatggccgtcgcccctcatatgcgcctcccgcggctcccgcggctcctgtcgctcctgtggcccctgtggctcccgcaccctcgtcacgacctggacagggcttcaagcctctggatgaattgttcgaatctaccaccaccaaacccaagctgtactaccttcccgttccacgtcccgttgccgacaaacgtctggaccaatttgatgagctgattaagaagggaacattcccacgtcctggtggcgacgagatgcggcgaattactttcgaagcagaggataagttcatcgacatcggccccgaacgatttggacctggacctcgtggacgtggacgtggacgtggacgtggcggacggcgtggggattcctggcggtcttgaactttcgaatgctcaaagcattgccattggccatgtacaatagactcctagcgtctgcaaataagaatccaatgtcaaaaaatatgtagcgccctgtattattcgcccaatacaacatatattgtacgtgttgggtccactcaagcggttaaaaatagatcatagccctacaacataaagaccctttcagcttccggtgatccctaggatatcggcggattatgaagagctgccagattatgcataaccagtccacaacgtcatctcctttcctcgcttactccgggcttcgtatggaaatagttgctgcttcaatattttcttgttgatcaccggtggcgtcttcccctgtcgatccggataagaagataaaggggaaaaaaaggttcactccgtcaaccgtcctctttgccattttcaccctagcagccatcatgggctggccagtgtgtaataccacagagaccgaaacaagtgtgttgcccctccccccgcgccttaatagggtgactgatcggaaatagttgaggagatcgcactctgggatggtggcatttcatttcatctcctcgcgctcttggtgggcggcgcttgcgctattatcgcctgtcttgtatctttcgccctgattatgctacatgcgacacattacagcaagccgatcgaacagcgacagtaagtgcgcctctctagggtagcggttaaggcatcccaaacattgctgacatggtcctcgtccccgcagtattatccgcatcctattcatggtccccgtctattcccttgtcgcatggcttagcatattcttctaccaggactccgtctactttgaggttctcggcgactgctacgaagcgttctgtatctccgccttcttctccctcatgtgccactatatcgccccggatctgcacagccagaaggaatacttccgtgggattcatccgaaagaatggctctggccgttgaattggtttcaaaagacctggggtggcgagcgcctctggcggactccgcgcagtggattgacatggttcaatgtaagatgatggacttgaccagatgtcgggagttttagaatactgatcattgtgcagattgtctgggtcggggtattccaatattgtgtcatgcgcgttcttatgaccattgttgcggttgtcacgcaggcttttgggctttactgcgaggcgtcgctgagtcccgcgttttcgcatatctgggtatgtgaccaagtcttgcgctttatcctgtcgatccactaataacctattgatagaccatcgtcatcgaatcggtctctgtcaccatcgccatgtactgcctaatccagttctaccaacagaccagtcaagacatcaagcaatatcagccatttttgaagatcgtgtcaattaagctcgtcattttcctgtcattctggcagtcagtaagaattttcgcgtcatcttctgataaagtgatttatttattaactcgtatttactttagacactcatcagtcttctagtttccgagggtgttcttgcatcgactgaaaaaatcgccctgaacgatttcaaagttgggctcccggagctgctgatcaacattgaaatggctatatttggtatactccatctctgggccttcccatgggagtgctacgccctctataacctgccaagtgaagtgaccgatttctacggcaacggcaaggtggcatatcaaggtgggcgctacggtgaaagggccttgattgatgccatgaacccattggaccttctcaaagccatcggtcgaagtgcccgctggctgttcgtcggccgcaaaaatcgtatgctggaccccagttatcacgtacaagaccagtcactgggcctccagccaccccaagatggccgcgaactcacccaacacggaactggcacgcctggaggcgtaatgggccgctatggggaccggccctacgaagaggacgatgtgcttctggccaacgcgcaatccaaccctgagatatcgctcacgggcacttcgccgtatgcgtcggacctcgatgagttccaaaacccgccaacaagattctacgagcgaagcccgtcatcttatgacgattccagtcctgacaatctgcagtcggaatcgccgatccgcgtttcctcgcccaacggtcctctccgcgagcaattccctatacccattccggatccttaccatcctcctcctccgtatcatcattcatgatccatgtctatgattcaattataactcagtatagacaacacatcttatattggcagggcttgctttgtatgcatgtttcccctgttattgagctgcagatttggttcttttacctcacgctacccatgagcacttcgagattttttgcgcttctacttttttctttttgtcccgttgtttggataggtatggatacccgcctgttgcatagcggcatgtttttgttttttttttgttctattcttattcccttattcctttcattattctttatctgctatatccccatcgacgcacattctcctagtatcgttgaggttatatttcttgtatagtatcgtttgggcttgacttctagtgtcaccgattggacaaggaaaaaagaggaagaaatcatatcgaagttcgttatttcgtctaaatggccttgaatgggccagaaatgaacactgtctaagcaaagcaagtgaaagacaaggcccaagatccggcatattaccatttggggggtattttcatgggctgatcgtggaaacactcaagaactggctatcacgaatacatcccacttccaggacctccacgcccacctgggccatagaaatcctcattgaagcccctttggagcatggaggaatccttgcgcgcggtggctacgtgacgcgcagtctggatgactgcagatttgcggcccaattcgcgcatagccttgacgttgtcgccaagttggccaagtagtgagatcaataggacgtcgttgctttgcgagagtacttcggtggtgaaggtgctttgctctgacggagaaaggatagagaggtgcgagagaagagagttgacgttgcggaggattgggtgtgacagcttagtggcggatgtattttcctttgatcgatctaagctgaaatccgcctctgagagactggagaggtaggatttgatgagggagatgcgggattcgagggtgcgaacggcattgagacgagtgctgaggcttgcgattacttttccatcggttagtatcaaccatccatgctgcagttgtgttgagactgtgaaaacttacactcttcctcctcttgtgagagttcaacctgcgagctctgcttatttggctctttctgttctttctgcttcgcacgcttggttggctcctgtgtcgcattcaaagaagcggtgccagaggcctggacaatagtatcgataccaatcatctctgattctcccgtttccattgagtagggcagctccctgaatttgatattcggcaccgactcctcgccatcaacctgcatgtccttgcttgcatcgggggcagtatcgccttcatgaacactttcgtacacggttaggggaagtttgccgctatttgaacttgaagcctggagctgtgaagggtggaaggcgaggaagacggcagattcgttgtagtcctggaggatctgtcgatggagggggagatgggcgtcattgggtccagtccatggcgcggttgaccaccatccaacaaggtcgagcgcggggtctttgtgcacatccttgactgtaatatggtcagtttgtactcgctaagaggagacctaattgatctcgtgaggggtttcgcgtacactgctgaagacgttcttcaaaccatgccgccggcaagataatctcatcgttcagtccacaagtaactggacactcgaacgtttgctcaagtgttatctctcgtccattctgctgacctaaaagagcgccgattatcggcccatgctgctgtcgggcagcgtgtcgggtaatttggtcggagacagtgagaagaacgagtgggtgtagctggatatggagacccgaatcggatgacttctgagaaactagactctgtggaggctccatgactgtaggcaatcctgggatgcggaggaacttgtggtgaatgactgagtagtagagacggttagtcgatgcggtcatgtttggtcggcttggtgttgatgcctgaggctgatacgagctttccccgcggcggaggcgcgaaggacgagcttcacctgtcacgaaggcgtccatctcagtttgaagtctgtgaatggtttttaaaagaactgaagatatcccaagaagtcacaatgtctgtcccttcaacctttgatgcagtgaaatcacacctcgctcaagtccaggagaacccctccacggctttggacattcctctcatcgacaagttgaagttgcaactagtcgaaaacaccgaccccatagtccctgccactcttctgtcgcaaatctcggcgctccttcccatcttgcaagaagaccctacgcctattacaactctcggcatccgagccaccgcctacttcacattcaccaatctccaatctatcgatcccccgatcaatcttgtcgctggcttcaaggccccatcaccaccaatcaacctcctagctctttcactgttagctaaagccgggcagaaatacagtgaagctgctatagttgctggtgattcggatttggtggcttcactcgtggagctatggctttcaacatcttcgggcgaagtcgcacaggctgcacttgacacattatgggcgcttttggaggttgacgttgcgaatcacctggaaactggggaatatgagcatactggtaatgcaagtcatgcaggacagggactattgtggaggagggtattcactgataaggatgtctacggtctattgttcgggctatgcagcctccagagtgatgcccctggtgatctttctaaaggcgaaagaacgatcgcacagggcaggctgatgacactcttagtgaaagccggaagattacgctgggacatcatctcaaccacccaagtaccggaaatcgaggccaaataccagagcagtagtctccttcattttgcaacctgtcatatggtccaagtgagcgatgtcttgatgtatatgacactgctcaacttcttccgcgagctgctagagatcgatggaccgggcctcgtcgctcgaagatctgtgcagtctacttcgactttttcgtcccctgccctcgacttccttgtcgaacaccaactgcattctaaagtgctgagttattatctcgatgagtccaagctagactcggtggatcttatctacctatccggcccaatcatggcatatgtggctcgatatgccgagatgtatcccaaccacttgttgcagaacccctctaccctacttgacgcgattatctcccgcatcaatagatccctcgccattgctagtgcacaatgggcacacggcgaagtacccacaggtcaccttgctattttagcttcactgccccgagtgcttctcgtagaggcaggtatatatggtgccaacccggttcttgcaattcccacaaaccctccgaatagtgaagctctgggcgttctggcgaaaattttccacggacctcagcgaactggaatctctgattcaatgaacttgaacacatccggctcaactccaactgactgggaccgcgaagcagccgcagcgcgcatcctctacttcctctatgtcaaccaacaccccactttctgggacaatgtcgtgggtgctgccgacgtcctagtgatgaaagatgttgctttgtcggctatttctttcatgggggctattacaacagcgaactggaaactctcaccttcagcacccgccaacaccgattcatcgcggttccagctgccctccgaaaaggatctagatcagctatccccggctactaatgggtttttccccacctctggagcatgggcagttctcactccacctgccctaaccacccttcttccatatcttttcaagccacctcgctcctacgctgatttcgtcgggggtggtgcagctgattcccagaatgtcgtttggaaagttgccactgcgaaacatgatgttatcgtagcgctgcacaaccggttgcaagaaacagatggccaagtggaagggtttgaggatatcatgcgaaccctccaacagcgtgtgaacgagggtccccggggacccgtacaatttggcggtgctgaagtaatggctgccgggctatgaagtcgcaataaatttgaaaagcacatgaagcggtctagtttgttctcgtgtattctttctcgtgttcaattaagaacaatatcaagctcaagtctattgtagatgtactccgtagagatctgcattgttatcttagcgcggggaagcatttagagaatctgccagccctagtgctgtttcgggtgggcggtgaagaaatatatttttccggagtcatcatctatccgcagttatttcatgaagaatattccatattcgctaacccatagtaagtgacgttttattacggcaattatgtcacgtcgtggggcgccaaagggcaagaaaccccccggcacagagtttacttgggacgccgaccctggtggggagccagacacagctccaacgccgttataccctgtatgtttgcttcttggcctggctctccaggaaattttcatctttcaatccaatccccaccatgtcgaaagctacagagcctaacgccctctttcctcagaaatatactgtcccctttgctcggaagttgagccccgcggaacaaacccaggtagactactaccgagggttgcgcgagagctttcacgagggtccctactactctgttctcgatgcgtcatcttccaacgccaaaaaaggcagcgctgcgcgcgccaactttgacgctttccacggcatgcccgcttattctgggcggtatcaaaagaaacggcgcactctccccaagatcaccggacgatcttattgtaagttatttttaccagcgttaatcatttcttttccacggctgcatatgactaaccccgcatgcttgaaccactcagtcttgaaattcttcccccgcgagctatggcaaaccctccagccaaacttccgacccgacgcgtccctagatggctaccaggcccaggtttcagccgctgtagtgaagcgcggcttcgaagatgaagaagacgatactggacctgcgaagcgcgtagctgtcggcgaagacgaggatgagggcgatgcagatgcggacgaagccgcattgcttgatggggatgatgaacaggaagaggaaattatggacgacgacttctccgacgatgatgatgaaatgggcggcgattacaacgccgaacagtacttcgatgacggagaagacgatgtgggtgatgaagacggtggaggtggtggcgacgatgacttctgaaaagcagattcacgatacccttttttaattttcaatttagccttactatggctcttcagcgatctggtttatgcctcattggcatgtcctgtatatctatccaatgccactgtgaattattcggtgtgctgagcgcagataactcccagtagcccaggcttagacctaagattcttaacataatacaatcatagaattaaattatcctcaatgtctatatattcaaggtactcttacgaaacaatgcatccgatataaccttccgatgtcggtggtagataaggcggtgggtattcgataagaaaggttgattgggcttttgatgacgtcagccgatttttggaggggcaaagcagaaattgttcagacacttccacatcagagcgcagaatgggcgacacccaaagtctacgtcccttagaacggtctgtgctcattctctatggctccgaaacgggcaatgcgcaggaagtggccgaggaattgggcgccttgactgagcgactccgttttgcgacgcatgtatccgagttgaatcaatgcaagccggtatgcacttatccgcaagacaatgatcctctacagacctaatacctctgaaattataggagtcccttttttcatacacactcaccatatttgtggcctcgactaccgggcaaggcgatttgccggccaatgcgcggtctttttggaagtcgctcttgttgaaaaagctacctgctaccttcttgaatggcataaatttcacttgttttgggctgggggatagctcgtatcccaagtatggaacctataccacaattgtggttttcaatggctgattgtgatagattcaactgggcgatacgcaagctctataaacgactattacaactaggcgcaaatgagatctatcccacaggcgaggcagaccagcaacatccagaagggtgagtactatcttgatcttcacgctatatgtccacgacttacgtgggtttgacacacagactcgagggaactttcctaccatggatgacggacttccgaaaacatttgctagatagacatcctctccctgatggacagcacccgatcccagacgatgtgcagctcccaccaaaatggaagttgcaattagcggtggaaaacgattcggccccaataccccaagctgcagtcgcaaatgaacatcaagcttctacggatgaatatccgggactataccatctggaccatgactcccgacctatcccacatacgctatgtgcgacattgactgaaaatcggcgcgcgactccgcaaaagcattggcaggatgtgcgccacattaccctgaccgtcccaggccttgtctcttacgttcctggagacatgatcgccatcacaccgaaaagctcttcgattgatgtccaaacccttattgatttgatgggttggaacgatcaggcagatcgaccaatctctctcgttccaatgggagatattccatcaccgccacccattcctggcctcgactcatatcccaacctcactcttcgcgctctcctcgtagactatctcgacgtcaagggaataccccgccggtccttcttctcgacgattgcacattacaccaacgatgaaatgcacaaagaacggttactagaatttacaaatccggaatatctcgacgagctatgggattacacgacacgcccacgacgtagtatacttgagatcttgcatgagttcgacagtgtcaaaattccctggcagcacgcaatatctgttatcccggccatgcgcgcccgccagtttagcattgccagcggcggaaaacgcaagcagactgctgatggcaatacacagttcgaattactcattgccattgtcaaataccagacagtaatcaagagaatccgcgagggagtctgtaccaagtatctttccgtgctccggccagggagcacccttcaagtccagctccaacccggcgggctcaagtcatcagttcagcaactaaccgcagcaaccgtgcttattggaccgggcactggaattgcacccctgcgctccatcctctgggagaaagcggcacttgtgcaggcttaccgcgagcaaaaccctgacgtcaatccaccgatcggcccgacaattctcctatacggaggccgaaaccgagaatccgacttcttcttcgaggaagagtggacggagctcagtaagctcatcccgctgcaggtgattactgctttttcgcgtgatcagcaacgcaaggtctacgtgcaagataccattcgcgagaacttcgcgctcttcttctgtgtgttgcatgatatgcaggggtcggtttacatttgtggttcctcgggccgcatgccgcaagctgtgcgcgaggcgctcatcgaaaccttccaaaatggaggagctcctttgccggggcaacctttcacccgttctcaggctgagggctatctcattagcatggagcagactggccgttacaaacaagagacttggtgatcagtttgaatacttggtttacaccacagcatagtatgacattttctattgtacatctagttgtacatctagttatggaaagatgcccttggatatgtacgtaaatcagataggaggtcacaacctgtatctacaatgcgatgtaatgtcaaagcttagacatttactcattttacagctcattatcatgaaaatatatatctgtctatcttgcatgtatttaatgatgacattgtctactctgtacctaaatagctagatgttgttctctggctgcctctagctttggtatacaatgtcactcttgtccaaattctttaacagttcaatggcggtttggccgagtgattcaagatgattcagtcacatgtggtttgcggggatagctcactagagaactacacgaaagacatatatgttagggctaggcgttgacacaactatacaattcatgaccatatcaacagactacagtagactattcttctcagtcttgtcaaatgcaaaacaatatccatcatcacaatatgcaaaccgctggctgtatggttaacctcggcaggtcggtcgtgtgactacggcggagaattgcggccgtcggtaacccatatcacttctatagctagttaaccgccgcctttctatatttcgtggttatttcttaagagaaattgcttgtgttcgtgagccgctcttgattatatcgatttgattatgaacagaaatggtgatagagcgtgcatgctacatacaaccagctccagtgctccagtggggtgtatagaagatgagattggaaaccagtaacacataataaaagggatgtttttgtgttcaaatgagcattcattgctccgtacatagtttctttgctgtattgccctcttgtatcctcgaataatacaaaaaggcaaggtctatggtataccgccatggcatacttatagatacgttcgttgtacaacagtttccacagagcgttattactcaagggtagataatttggaacggctatctagagaagtctagactagcgtcatatatcccagaataatgctcaacttacctataggatctgcgcgggcggcgttcatgctccgaccccaagcgcttgttgccatagtggccgcaaaaacgagcggtatattgaggaatccgtggcgcgacgaggttaaactcgggccgcgtcggcgttttttacctcttggcactccgtcaccgcacgctttctccctccgagcttccaatcttccttatatcaactcaggaattggctgttgctcgactaccaattacaaaatgagtggcttaaggatattggtgcccgtcaagcgcgtgatcgactatgcggtaagtcaagttcccattcaactatagcccctccaagtacagctttgcgcgaccgtcactctgagctgtacctctcaaccaacagggttgtcatccctccatagcactcactctgggattgggatatcacaactgacaccaaatccgaatctaatagatcaaaccccgcatcaacaaggcccagaccggtgtcgaaaccgctggtgtcaagcactctctgaacccattcgacgagctctcaatcgaagaggccatccgcctgcgcgagcgcaagggacccattaaggtcgaagacatcctcgcactttccgctggcggcccgaagacccctgatgtcctccgcaccgccatggccatgggggctgaccgagccttccacatcgacgtaccggagaagggcgacgctggcctcgagccgctgacaatcgccaagatgctgcaggctgtcgttaaggagcagaacgtgaacctcgtcctgctcggcaagcaggccattgacggtgaccagggtcagactggtcagatgctcgctggtctgcttgggtggccccaggctacacaggccagcaagattgagattaaggatgaggctggtaccatcgaggttacccacgaggtcgacggtggtgttgagactctccgcaccaagctgcctatggttatcactacggatctgcgcttgaacgagccgcggtacgctagcttgcccaacattatgaaggccaagaagaagccccttgagaagaagactcttgccgatctcggtgtcgaggatgtacggaagttgaagactgtgaaggtcactggtatgtgtttctgggtttgctatttggttcgtgggattgtgctaacattgtgtagaacccccgccacgaaagggtggtggcaaggtcgaggatgtcgatggccttatcgctaagcttaaggagctgggtgcgttgtagatgcgctaagcttgctcttgattacactgcgtttctataccttcgcctttgaaatgttacctactagattggaatcgtcttgcgcatttctcccacagtttctgatgggcatgctttgtggcgaggcatgtgtgcatctattggatgctagatctataaatgaaaaacattctttgtatttgatagtatgtactagtcccactagttccaaacgggttggcgttgtgttcaatgatacatcttccctaagcatatagtcatagttcgccaaagggggccacactagtgcaaaatcgaggatcgcaatccgccacaggggcgctagagtggctagatcttgtctacggactaggaactatgcacgaaataataaccaccccgtataggtatggccatatacaatatatcttactcttccaaccttgggaggtctctttattggcaaaactacccaatcggaactctatagcgcccaatttcatctcagcccgaggcaataatatacaatttatcagccacattgcctaacttcccgattggctgtgatggaatgtcccgggagcctcacagctagaagaacattcttaggattgagtgaaattgcaaaagtactaaggaaggatagtatgattctctaattcccccattaggcttaagtacattagtgtagatgtgttatgagatcagcgcaaaagacgatcttgcattatattagttacccttcacagtgtggatacactagaatatggtggtggcgaaagctcagctgaagtgatatccaatctcaaataactgctagtacaaatacggagtatatagggaaaacctagccgacggatgcgtacggaggcatggccttatagcgtggtcgatcagctcagcctagttgagctgtcatgtatgggatccactggggcttgaaggtggacaggtcaaagaacaaatgaacaatgacaatgtgtttcatgttccgaggtattctattcggcagagaatactgagtactacagcatatcggtatatgtagtcaaagtagtctagaatggtaggaaatgcctcgacacgcgttctaccagggcttttaaattttcccggtgggggtatgaggtatgtgattagggactgactatgtatggattaataagagtactatagatacctacgattcgtataaatacataaataacatacagagtacaatatcgattgtcactgcaaatgcaaaaaccaaatgaaaaaaaccaaaaagcgaaattaaaaattaaaaaaccaaaaaaaccacctgatccgtggatgatgacattgcctcgaaccttggaaccatggaagagcataaccgtccaggccctattaaacccttccgtctgacccggaaatcttttttataacttccttttgcctcgtcagtcgctataatctcgcctttcacattttcgacgaactttctatacatttgcgaacattcctccccgcattcctggcttgcaaccgatctcgcattcttcgatctagctggaaacattccggataagaatatatcgggattcatgctgttcgcggcgcaagtcgtgtttcagatattgcgagtatagatctcgccttgatcagcctctcgcggcgcgaagcgcataacctttgctacttcttcagttccccataacgtcacagcctcttctgtctggcagcaattcgttatgtcttctcaaaataaatgggagaagacgttgagcatctcgaaaaagggctttgacaaagcatgggacaccgtcgacaagctgggcggccccgtcaaccgcctgtcacataagctgggtgccgaagccttctggcccatgacaatcgataaggaagccgacaaagccgcgcgcatcctacgcagtttctgtaaagatggattctacgcccccgattcctcaagtggcaccgatgagaatggaaagatcaatcgccccaagggcagacaacgcgttattcagaagatcccatcaaaagtcctcaaaaatgccaagggagttgccattttcacgactatgcgcaccggtctgtggatgagtggctctggtggtagtggcgtgctgattggtcgcatccccgagaccggcgagtggagccccccatctggtatcatgttacacacagccgggataggcttcctcgctggtgttgacatttacgactgcgtggtcatcatcaacagctatgacgcgctcaacgcatttaagaaattccggtgcacccttggtggcgagattagcgctgctgcgggccccgtcggtgtgggtggtgtcctcgaatccgaagtgcacaaacgccaggcaccaatttggacatatatgaagagcaaggggctgtacgcgggtgtcgcggtcgatggcacgatcatcattgagcgaacggacgagaacgagcgcttctacggcgagcggatatccgtcgacgaaattctctccggcaaaatccgacatccaccttacgagctcgctaccctcatgcaaacattgaaggccgcacaaggcgacaccgacgtcgacgggagtctcattccgccaccgggcgaaacacctggcgatatggaattgacggaagacggacaacaaatctttggcgtgccggctgtggacgaccccgatccgtatggagtgaaggcgctggaggcggaggggcttttcatccgcgaggccggcacgaaagcgaggcccagccatgagacatttgaatttcggcctaacctagacagtcctatttatagcactttctcgcggcgcagtatggatagctcgccgcgtaatagctggcgtgctagtgtgcagagcgccaagagctatgctagtgtcaaccgtggcacgcaaacgattgatgagccgctggtcgagcccacgtctgtgagccgtgcgtcttcccgcaggtcgaagggatcgtctattggccgtcaaccgatgaatacctgggacgaaaatgagcctcattgggatacgattgctatccatggcaatgaagaacacgtgaaggtccgccaattggaaggcgaggaggcggagcataggagagcgaaaacggatgcctgcccagatgcacacgatgaccccgcgttcgaggatgaagacgagcactttgagatccacgagcttggcaatgtcaaggtcacaccaatggagattgtcccagcctcgccgtcgaaggtggaagaccagacgacaggcaagcctacatcgcctagcttcacccgggctcgtctagtcacaatcccggcacgcaccccgccccccttgcctccgcgacaccccggccacgtccggggctctggctcaagccgtgcctcaatgtcgccaacagcgccctcatattctagccgtaacacctcacctacagacgccaccgaggtggtggagaataccgaacatttggatgaaactccccacgccattccattccccgagaccaagacctctccccatgtcactcctgcgagcgatgacgaggagattgtcgagaaggacgaattccactctgtcgacggcgagtcggaggatgaggataacgtcattctcctcgaagaccagattgccacccaggccgccgagcaggagaacaagatggacaaggaagacgagaagacaaattcactcgatgtccccaagcttggacctagcatcaaatatacccccgaggttgaagagaccctcgacgagatcgaagccaagcttgaagctgagatcaatcacattcctgctgtccacgaaaaacatgcagagtcccccgctttgactgaactcgataccaccttgccccatgcccgggctgagtgatcttagattctgagtaactgtttttctgcttcctctttgcgatttcctcggcattctcgtttccgtatttttctcgaaacacaccttggcacgatacctcttacgcattctatacacatttaactcatttgggagttcttggtcattcagtctccattttcatacttcttccatccccatctcatctccaaaaaaaggcttttctttgttggtttcctgccattggctttagcgtgtctgcattttagcgattggggggtattttttttgttcctgggtcaggccgatggtgaaggggttctttgggctccttgccttttactttatttgaagagctttcgctcgagttgcattatatcctgtttcctggacttggaatacgctcttttatatattggtatttggctaagcttgactttggtcggttgaattatataacatcagtaattatccagcgcaggtctattaaatgtacagcagcatgtctcatctcaagtagaaatcatccttcgaatctattatccttttccatgagaaagtagatggaattacccacgtataacttctagaaaagcatagctgatgctgctttagattgagatgcttcagttatgatagcaaagccttctagaggtggaagtaaagacaccgaggtatttatatcagtttgagccgatagagaaggctcgctcacagaagagaacgatcaaaagacagcgaaagtgtcatgtatgaaaataattaacccgatagaaaaaggggtgggttaatccggcggcaatatttaagtgaaccaatcacaggaattagagtaaacctcccggaaaaatggagatctacagatttgtatggcgccaaaggcttcattttcgacgatcatcggacctagttattccgtgccgacattatggtgattcggaccaacttccaggcattaaggctttgatatggtgcaaacgacccctgcgatgctgcctacttttctttcctcttccttttctctcctcttgaccatctcccctcattctctctccttgaccatcttaccccttatttccaatcctccaactgcatgaaacactcattcgataccacagttcgagcgaacctcgagcagtcactccatactcttttccggcttccgaactacaatatttgcaattgactgttcaaagtctcctggtctcccttgaacaaatgcaacatgacttcaagtgtcgcgcgaagctcgaaaggcagcattaagaagtgagcatgatggctggaaatgtttgtttattgttactaatttgacgcagaattcaaggaccaatagtggcaatcacggtcggggcatcaaaggaaccctttcatgtgcacgaatcaatcatctgcaattcttcgctcttcttcaaaacggccatgtcagggtcttggaaggaatccaaggaacacactttcaagctcccggaagatgaccccgaaatctttgctctatatttgcactggctttacttcgccgaaatccccgtgatgcttgaaaaatatgcagcgaaggaagaagcagcaaggcaccgttacaaggagtaccataatttcgtcgatgcatatgtgctcggtgacaagttgctcgatggcaagtttcagaattcaatcatcgatgcaattctcgagatgtgttctacgcctgatgcacacgatggaaggaaatactatcctagtatggcggtgatcaagcatgcatacatagttacgaccgagtctgccggaattcgcaaactgtttgtggatttgtttgtgaacactgcagcagctaagtggctcagcagagaacttccagcggaatttctctattcggttgctgaaggcctcatgattaaaagaacctcgtatggtgggccaatcaaagcatcccagtattatgctaagccctcgttattctaatgtggcaatgtgactaccccgggcttttctgacttcattctgacttcattcatcttcccaccttgttttgaatgatctctaagttagtccaggcaagtagatatataatggtcaaattttgtattcgtttcatttcttgaaagtccgtagctaatccagctaatcggtatattcatcttcgaccttggtttagccagactcattccttcttatagtctgcactggtgtgtctactcgagtccttacccctggaaacatggactacataaattagaaaccgccgaatgaagaatagatgccgtgatatccgacagtcaaggccaataatgcagatgtggacactggagatatgaaaattccgaaaagggaaagatatgccaggacgttacctcgttacctccgctaagtccgaaagcttgtgcaactttatttgaaagtatcatacctgcttgttccaaaaggacacatcctccgagattttcatctcccatcttttcatctccaggctcaaagcatccaaaatgccttcggataaccacatcaaagcagccttgtctctcatcgaggacaagtccaagatccttggcttgaccatcggcaactatgagaacgtgcaacctggaacatacctaccccgcaaaggtacgaagcagtctattgcctgacctccccttccccccccaaatcgtgtgacaggcaatccaaatatgggactaacaaaaaccacagcatgtcaagagcccccgaagctctccttcactggcaccaaccctaacagcacctacatgatcgtgagcatggacatcgatgcccccttccctggcttcggagtcctgggtcccatacttcactggatccagtccgatgtcaaagccaccagcgagggtgtgctggagtacgaagcgcccttcgtcgccaactacatcggccctgctccccctccaatgagctcgccccatcggtacaccttcttcctgtacgaacagcctgcagactttgatctcacggcccatgcacctgctggtggtaagaagcttggcaactacaatcgtatgtggtacgatcttgatgcttgggcagagaagatcaagcttggtcctcttgtggctttcaactattttaccagcaactagctggtttttgatgttaaccgggttatggtttgatgaagtttaaatgggaagatacgttgtttctcgtgatcgttttattctcgagtccagagggatctcactaattgtcagtcaatgaatgttgctttactttgactaaattaatcaataactccaaatttttcaactcaacatcctatactgtaataaggaatgcacatgtgtcttctcttgcttcttgctttggcagtaatagacaggagggcttctcgatgagccactcagcttgtaaatcatctactaggtgatatctcagccctcatacagccctcagcctcaggtttcaatggagaatcccgggggcttgaaaggaacatctgagattgtctttgtttattgtttgtctgtgccattattgcagtgtcatcaatagtttataagggtagtcaaattcccccacaaggaatttctgcgtttaatttcatgggtacttttcttagtgtggtttattttccatcggggaagatggcttccaacaaaccggtagacaagctggctgacaatctgaaggggttggtcatcggcgccagcggtacaatccctggatatcaacatggtatgttttccctcatatcaaagcagatctatggaaagagggagagagacgtttcctagatataatttgatgaatgacacctgttatccagaggaaatcaagcggatggtcgaggaatgtggtgcgaagtttgccgcgataaatatcaacaaatgcactcatctggtgacgacagaaaaaaatgccaacaaagatttgagaaagagttagttgcataagcttcgcattctgtgatataaagtgtctactaacagggtgattttgcttcagtcaatgtggctcgtgaactagaaagctgccaaattgtgaacattgattggctgcttaagaagatcggaaacgatattccagagcatggccagaaaaaaacaatcaagggcgagaggaatgaagagagcaagcccaaaggcagaaagcgtgcgcgagaatcttcagttcgggacgacgaagacaacccttcgaagagaacgaaggatgaagaacagatcaagctcaagtatctgatcagtttggttgatgagaaatacccaaacccgagttagtgatacgatggagtattttcgaagacctttctaacacttcggtattaggtagcacgctctccgtttaccaggacgacaccggtttgatatgggatgccacactggtcagccttggtgtgagaaaagtccaaatttgtcgcatacaacttctccttcgtcgcgagtcacaaaagttccacctgtggaacttgcagtaccaatgcgggtcatccgagacgtcaacatcaattggaagggtaggaagcctcgactcggtcaagcgtgcgtttgaggtgaagttcaagtcactcagtcatctagaatgggaagaccgaaatgatattccttcttctaaaggttggattttcctccagatgcctcaaagggaagttcccgtcttcaccagccggatcagcccgttgcctacaagcgttgaggacgttttgaaaatcatcttcacatcaggagcagacttgaaaaactatgtccatttgctaaacagtcaggggcgcggtatcttgcttgaaaaccaagtggacaagaaaaagctcctgatcgggattgcagtcttggccaagctgatggagctcaccaatcctcagctaaatccttgcgacacttacaaagcgaagaacaaactgtgcaacttctacaatcacttgattctcacacaagggactctttcggataacaaagatattgtcagacaggagttggaatccctcgatctgttactcaagttgcgcgatgccagcgagattctggaaaaagattgccggtcttcttcattggcgatgagccagatatcccaagtagttggtctggcaaaaatgctcccaggtatatatcctttgtgccttcttatagtaattccttgagtgcgttgcaaagcatgaatctgacccttgttgacagtgaggagagattcgacagagttcaagatgctccaggagtatattgagaaaacttcttattcacaacacatttatcaattcaaggtaagctgcgctcaaatgacataagcaaaatcccagtctaacgcattcatattcctaggagatcatcggcctgttccgtctcgaacgtcccggggaagcagagcgttttgcccagtgggaaaaggaaaaccttgctaacatcggagatcggcgacttctgtggcatggctcaaaagctagcaactttgcagggatcttaagccaagggctgcgtggcgacgggattgtcagtaccgatggaaagcgcttccttcctggggtatactttgccgacatgtctactaagtcggcacaatattgcaaagggaatggggaagtcttgatgttgttatgcgaagtcgagctggggaaatccacggctttttcagtccaccatcttggcatgactgtccataataaatggcgcgatgctggatatattcacccagatttcaaggggtgccaagtgccagatgttcacgcgggacgatcaactacaaccccgaacggccggcgttattacacctctgagtatatcgcgaaaaacccagcacaaattcgtcaacggtatttgttccatgtcaagctcgttcaaacgccagggacttagggcgacgatgattgagggattcgagttaactacagaatgttgagattttcctatctggaggtatttagatttattttagttcaatgcaactttagaagctctatatctgcataatcccacctcacagacatcgggtagtggatgaatatgtacaacatagctagggcatcgaatatcaggtggttttgtcttggcacttcccctcccctcacttgcacgagcacgagccacattgacagaattgttgccagggttgtaactcttctctcggggtattcttttgcttcccacagctcgttcacgtcatgattaatttgtggaccgccgctctggtagtaagtgctgccgcgcagtactttccgcccatcccagatggattgaaggtggttgaatcgaagcatcagaagggagtgaagatctcatacaaacaggtgtgattattttgaagtcgttggtatcacataatgtcatactgataaatttcacagcctggaatttgtgaaacaacaccaggggtgagatcatactcgggttacgtccatctacccccaggctctctggacgatgtaaatgttgatcaagactacccgatcaatactttcttctggtttttcgagtctcgtcataacccgaaaaatgcgccattgtctatatggatgaacggaggcccaggaagttcctccatgattggcctcatgcaggaaaatggaccctgcatagtcaacgaggactccaattctacggaactcaatccctggtcctggaataactatgtcaatatgctgtacattgaccagccaaatcaggttggcttcagttatgatgtcctgacgaacggtacctttgatcaggttaagggtgcctggaacttgtcggagtggtccggggtgcccaagcagaacaacactttctacgtcggcacgacagctagccaagataagtcgactgtggctaatagcactgcgaactccgcgcggtcactatggcactttgctcagacctggttcaccgagtttccgcattacaagccccatgatgaccgggttagcatctggactgagtcatacggcggtcgttacggtccatctttcactgccttctttcaggagcaaaacgaaaagataaaaaatggcagcatcgatgcctcgggggatccacactatattcacctggatacactgggcatcatcaacggctgcattgatctcctagtacaggaagcgacatacccagtaatggcatacaacaatacctacgacatccaggccatcaacaagaccttattcggttacgctatgaattcatggggccgccccggcggatgcaaagaccagatcattcactgtcgcgcgctggccgcagagggcgatccgcaaatgcacggcaacaacgaaactgtcaacaaagcatgccacgacgccgacaagttctgcagcaacaatgtcgaaggtgcatacttagagtttgcagaccgtggctactacgacatcacccacaagaaccccgaccctttcccaccgtcctactacttgggctggctgaaccagcactgggtgcaaggggcactgggcgtcccgattaacttcacccaatcaagtgacggtgcctacaatgctttcaattctgtcggagactatccgcgttcagacgtgcacggctacctcgaagacctggcgtacgtgctcgactccggtatcaaggtcgctctcgtttacggcgacaaagattacgcttgcaactggattgggggcgaagacgccagcttgctggtcaatcatgctagtgcttctgggttccggtctgctgggtacacgcctctacgcacaaactcctcgtatattggcggccaggtccggcagcatggcaacttttctttcacccgtgtctacgatgctggtcatgaagtcccggcctaccagccacagactgcatatgagatcttttatcgttcgctgttcaaccgcgatctggccacgggtaagatcaatactgcacgtaatggctcctatgccacgcaggggcctgcgtctacttggcatatcaagaacaaggtcccggagagtccggatccgctctgctatatccttgctttggggtcgacatgcactgaagaccagattgcaagtgtgatcaatggcaccgctgttattcgtgattatgttgttgtggaggaaagttgaagtacctcatgtaagctctatgcattattgctcctcatgtattttactagaacacacgaaatgacatatagaaatgagtatacatcttctataagtgagacttgttgtgacgatgtcctcgtacgttcgatatccaatacactctttgcttgcagcgaaggcgaatatctcaaacataactggtcagatggctcggtggctgagtcaactcaagaaggtcatgaatagcacatgagtggatatatcgcatcttgaacacgataggagaattcgagggtttcacaagctgtcacagcctaagtgtaggttttgcatcgcatggaggtttgcgatgtctaggttcggcccgagccgtggtggcgcccgattcgacggatggcgggtctgaaaaccgggtctctggtttccaccaggtacataccgaggaagtaaagtaaagaagtctcctcacggtctaaagaaccctatggggttacttatatatgtccttgagatattcatatggtcgctgatctgtagagtcataaaacagacaatcatacagatggtaacagtaaccagaccggatcactgtgtttcagtatacaatcaattcacaatgctgtatcctccatgactgaatatgaaaagagcagtgatcttggcattgtcttgattgaaaccattgtatgcactcgtattataatttgggatgagagaattgtgaaagtcaagcatatgacacatatctgagacatcaggtagaacaatgaaactactatatgtgactgcaaactaagctacgatatcatatcctaaggaggaaggcacctgcccagtcccagatcaggtgccttcccttttggtcaaaaaccgtcaccaaccccagtttcctatttacctttagctactgggagggtataaatacctgcctctcccccctctccctcttcttctttctttcttctccaacactccgggcccacattgcacatcgtgttcctgttgagtaccctttaattttttgaacttttgccagctccagattcgtattcaacatacgtctgctgctgtccagtgaagggaaatcctgaggattctgattggaactttgctgcggctcgttgaaggctgaaactaggttggggcttcggtcctggtctaatggcacgaagcatgttacggtagaagcactctccctctgaccactgcggatacagactgtacttctctgagttctccattgtccattaggagcttaacaaaaggggctctgttctcatctccttcctacagggataactctctgttcccaatgatgaaacaataatctgagggtagaacgttccttccttcttcaacccagctgcacgggtcatgtgtgtagcacctgagcaagacttgcacctttacgtggtgttcaggatgagtagcctttacggcgaaaccaagcaagtcattatctagaacagctattaactgcaatattaaatcatcagtactcagtacaacattgtgcttcttgtaagaaaccaccggacattgaattattagaactagtatcaggtaacctgcaggtagagactagcgccagatttcccttgtgtcgatcatgttgatcagtcctatagatctcacactgacgcacctggaatgtgatctcgattgctgcacactacaatgcctaatctctccgatcacaagctacaacagcatctcttgcgacattctctctacttacggcgaaaccaagcaagtcctcattatctagaactgcaatagaacttggtattatatacttgactgtgtccttttgtaaatgcttctgtcgtaacctgtgccttcatttccaaggtttatgtaccgactctcatccatggatatcaaacttcttttcaaactgccacaacaaactgccatcaccacaaacaccttacattacagtgagtatcgaccagtcgccttctcttattcaatcatattctgactcctgaagtgttgcataagccttctaacgttggatattagacaacaaacctttctacccttagcaaattcaaactaaaatggcatttccacaccggttcggctggctcgcaagaccatcaccattttctacgcctcgacagccccgactgagtccaggcaagacgggacggttggtgacatacgatatcacttccgagatgcagtgcccactattcgatcggctgcggtgctgctttgagctggactttatgtgcggatttcaatctacatggggtcttcatgatcaacgctggactgaggatggagaacagttccatcgagagaacgaagaggcagcacgttaagagtcaagacactcatttctttgtttttgacactagctaacttagattcttgtcacagttactccctgttcagaaaccaaagccctgttcagactacgacatccacccggcccttttcctagtccccgacaaatgagacgaacccagccccgaccagagaatatgacagcaaccaatgtcttcatgtaattcaaagtatccatggtctttttacaaaacggtagccagacataccattggcaagaacatgaggccatgactgtgaaacttataccatcctgaggccagccatgacttacgcaaagcaccatattgtacgaatgagttcagtctcattccagaatcctcatttactgattatgaaacccttctcggcggcaagataccattctgaaagtacgccatatttgtcaatcacttgttcaggaacatccagtcctctggcgatgtactctaaaagtcaccaatatcaatggcgcttgcttctcattttcacagaatcacaatcgaagcttgccatcactctataactcgatagtagacttatgcatactgcagttcaattcaatgtcatcaccaggtcatgacggcaatcttgactactctctgaaacaatgatcttttactttcccctttccggaaccacacgcacgcaaaaatccggtcatgcgctaggaaccttatgcatgcattgtcggaactatacggcgaaagtaccctcgtttcttaatgctgagccctggtacacttgacatttgtctgctcttagttcgttcgctctatacctatagttgatagctaggtacttggtcttaggatgcgtagaaatggcaatgcttgtcaaatgagcatcagcacggcatcttacaagttcccaaggaggcagcgggactaaaggccgcatttggatgatgatatccattatttccggcagaggtgacagtcaatctcggctgggaagctgcttggacgtgggcttgttacatagatagacttctgcgcctttggcttttgtacatcagtcccagttggagagtatggtatttttctgtagactacattttagtttgtctatgcgaacataattaagttggaatatcgtgattgtggttctggatatactagttaaaggctcatcaagaacctcgtaagatgagtactctggaatcaagtaaaaagacgggggataaatgtcaacgctattgaataaaccatccatatcataaaccaatcattccttcttatcatgcgcagtctcgaccggtttactaccaacgccagacgaccaagcaacacgagcaagccgccaaagcacccagatgaacccaagagagatcaccgcacaagtaccaagctcgatatatttaccctggaagtagccctcctcgccctcaagtcgtagaaccggcacatcgatctcctccacaagacgatcacctgtaggctgaagctggtagaatagggttcgcggaccgaacaagctgtcccagcctagatgtgtgcggtcgaagggattcacactcatcttcgtgctgtcctcggaagtacaagcccagaagacgacaggccagggaatgtaagctgtgcggtgtcctgtttcggatggtggcaggtaccgcaggtgcagaggaatggtggcagtccagtttgaggaatctggtgtgttggccgtttcttcgagttctgggggtgttgctagttcgaagagccagttggagccccagcgctgaacaacccagtctggggcttccaggtccatttcgcctgctaaggcttggagggctaggagattgtgtgactcgaggaagagtggatctgttgtcgcgagctggtattgatcgccaaatatgacggaggggagggtgaggtatgtgtgcagaccgcaggttgtgtcgtctggtgctgtgggtcgtttgagggatgaccgaggcatggatatagacattgttgggtgaagaccagtcggggaggcgaaggagacggtgtagctcgatggttcagtgagagattggtgacgggaggggaatgagaacatagttggttctgtatgatggttagacaaaattcaagcgatctgataacgccgaagccacatacttagcttctcgtcctctccgacaaccgctaacagcccgcccatcttgatctcctctggctcaagccctgcctcggcgcccaagagaccgaactcgacttgatcgtcagcggaggctggcctttgaaacttatccgtccaaccgcccgtaggtgaactggcccagagcccagacacagttaaggcgtgtgaagtgctgtcatagtcgatatcgaccgagtccgcagagaggagagcatcggcccgggtgtggcactcgcggccacctgtacgactctggtcacagacagtgttgtgaatatatttgaccagcggctgtatggaagggagtcgggtgtaatattgtagagcggccgatgaaccgaatcgtgttgaaagaagcggaggtgtaatgaacgcatcctgtgtagcagattccaagtcagaatgaacacatgcaagatatggccagggaaagccctcgaaagaagggaacaatggcgaaatacctcctgcttcgaacaattcttatattgggcgtccttgctgggcgctactatcgtgcggagcagcgtgcacagtgcctctctatcgataaccaaatccgtcaatcgcatttcctccaagcctaagatgtagggatgagctcacgaagatgattccgatccgagcggagtataatgaacatgcaagccaggcgaaactcggctactgaatggcacgacagcatcgaaagacctctcggaggcccagcgaaggtggagctcatgggattgctcgaggacagcacgcaactaaacacatagtaaccaggtcagcattgtgtaattcttaacagatcttcaatcgacaatgccttctcacctcctctgggagctcgtccagtccgaccgtaatgcgatcctcccgcgcagcgtctatgtcacggacggagagggatgacgtggttaacacagcttgctccgggtcgaaggaggcattgacgctctggatgaaggtgattcttcgtttcatggtttcgatcaagggatatcgagtggacagtaaacagaagtgacgaagtccaagattgatctctccaaggtgtcactggtttctccgcattcgctcaattgggttagactacacatatggacattacgttattcggtcacgacttcaccaggtaaaacttccaaggttgtatgcatatattgtacatgaagatggcttgtcaaataaaagataaaagtgcttattaaaaaattctcatacaaaactttgttcgtgtcattgtcattaaatacgccctctttcgccccaaacgccaggtatatgcaattagaccggatccttctaaggcagcacatcccggaggatatctttttgggagctagtcaagctagtggggaaagtgacgttggcgcggatgattaggtcgccgcgggtgctggggttcttggagatcaccatgcctagaccggggtagcgctcttcatggcccggctgggttggaccaggcttagacacgcgaattgattttccgtcgatggtgcggacaatgcgttcccagcctgtcagtgcttcctttaggctgagatcgaccgtggtaataagattgtcaccagaacgcttgaaagtaggatgatcgatctgtaaacggttgttagcaatggttcaagtgtcttcatagtaaggagcggtctcatacctctttaacaatgagatgaacatcctgtcgtcctccttcttcctgatctccaatatttctatacttgatctttgagccagcacgcagcccaggcttgatattggcttccaaagtcacctccttagtagtgagcctgccctgtttgtcaaaggccttgctcttcgtcttcaccttcttagaggtacccttgtagatttcctccaaagtaagaggcaagtctttctcgatgacagtcggttcaggggtaggtgcgcgcggcttcgagaatcccggacgactgctacggaagccgccgcctccaccgccgccgcccagtcctcctgcgagcatggagataatatcttcttcatccatgccgcccatgccgcccataccacccatgccgccgctatccttggcaaagctgcggaaggtatcgttggcatcgctgaaactgaagccgccgccaccgccagggccggtcgagaagtggaacttgcggcctcctccaccgcctggcatgcctccgggcattccgccgaagttgaatccaccgggcatgccgccttcaaagccagatgggccgcctccgcctgaccctggtgggggaggtgcagggccgccgcgcatcagatactcgaggccgaactggtcgtagacctttcgtttttcgggatcagataggacttcgtatgcttgagagacctctgtaatcagactgttagtcatgcgtaacaaaccgaaactgtgcgggataacgtacctttgaatttatcagcagacgaagggttatccttgttcttatccgggtggtgcttcaatgctgccttccggtatgcttttttaatctcgtcttgtgtggcatcaggcttgatgctcaacacgtcatagagtttgctctcggcaaccatattgcggggtaaggatgtgttttatgttaaaatgtaaacagcaggtcaaaaatgatgagcctcgaatcggaggtggacacttatgaaccaacgatgagggaaaagattcctgcgtggggggtgagggatggtacggtgtgcctctcgaatgatgtagaaggttcgaagcggaaagacggatcgtatgtaagaggaattgaggatttaaggagtgcggaaaggcacgggttggagatcatgagactggagaagaaatgaagctcgagaaaatcctgcaaggaactggaaaagtacttgaatgtcagtgaccaaggtggtctccaggtgggtgacgtcagcggtgaagtcttgacgtgtgtgacttgggcccatcgaagtttcgagaagcttcgatcgaacagcaactcggccaattcgacgagaaatgctcaggggaagggtttaaatactatttagaggttctgtagggtaatattgcttttttcaatctgtttcaggagttgcaggggactttttggctgcttgttgactgcgatctacaattctaccgtttgtggagtataacaacgaggatacaggtcccaccgaccagacattcggaggtacctatcttgatatatccattcatatctcgtattgatcatttatctccttactttcacaatgctttccgtggtgaaaacaaaaaaaatgaaatgaaagtgaagacgaaagaaaaggtgcgaatgggtttatagtggccggaatcaggaaaaaagggcttatcggtactccccgatataaacaattgggtatcaactccgaactcccgtcaaaccacctcaaatccccatctcgggtaaaggccatgggacatcggtcattaaaaactgatctaggtcaaagttctgcagactaggcatatcaatcatcaaatcacccagccacgagaactccgcatctgataccagcacgtctggcgcaacctgctgctgcctttcactctggttggctaacgcggtcggtgcaatctgcctatctttctgatcaaccgctggagccgccgccgcagcattgacccgcaacacctcagcaagagcacgtgtatcatcctcctttcgccgctgatgcaacgcaatcagtaggtatgccgtggaatacgcctcacgcatagaaggtgtatcataggcagcgaggacttcgcgcagagtccgcatcgcatcggcgagcagcgccaacgcagcccgattgtcaatcgctagaagtgagcagacaacttgaaagggaacattggcaacttggtgccaggggcagctggaggcgaccattcctcgtgcggcacggagcccgcggcctgccagtgcaagaacgcggtcaatgagattagaggataatgggccgtgtggatttagggcgcggagacggcgataaatgcatagcattaggttgcattggactaatattagcgagggttcggaatagaggagatccaggacggaggcgagggctgtttcgagttctgggagatcttgtggtgacggccctgttggatcgaggttttcggacagtgggaggaggtggaagagctctgcgcgtggggctcggggtggtgcttgctggggtggattgcgggattggggtgtgattgtaggagagggagctgcggcaccgtgaaggacaacgcgggagcgaccaaggtcgaaggaaatccatgtgttgagatgacgagccatgccaaagagtctttgcctggttacggggtcgctggttccctgttttatatcgccatcttgtgtctcgggcggtgatgtatgaagcaggcctgctgcttctggatctgaagttccaagatgtagtcctgcagcctcgatgagatgcatcagtgtacaactggccatccatgcagcatgtggtgaggctgtcatgcgtaaatacgcagcacgcaacacccagcctgtcactatgtcgaccgagggtgtttctgctgcgaggatagtcttatccagtagagtgcgcgcggtctcaatgagtcgaagttccactgctatgatctcgcgccgcgaaaacagatacccaaaggcagccacgccgcatagtacggcatcataggggtgttccgcagaatcattaggagatgacaaaagttcccagcgctgtacgattcgagtaaagaaaattttgcggtccagaaatgtatagcatggatcgatcttctcgaagtagattgctgctagccgccgcatctcttcctgtgtgataagtttggtgatagtcgtcggcaccgtgacaggcatcgagggaagggccgaggatagtgttggcgatatccgtctctcgccgatgttccaggcaaacaattgcaatcgtggtgcatgagccgggtcaattctgagcccaagtttgcgaacaaacgcggcgccagaattggcctgtagggaatgagttacgccctctgaactgcttgtacagcggggagaagcctgcactgtagcggcctgttccatattggccgaggcgccgacggtatttgggactgcatcggaccagccatctgtaggccgttcactgagtgacaggctcgctcggtacagactatgcggtatggcgcgtttcttgcgcgcactgtattggcattccgcatcggtttgggcgcaagtgctacagggctgaccgcctgaacatttgcgctttcgtgactgacacaaagtgcaggctaaacgcgaacgctttcgaggcgttgactcggacatctttgaaaaaatacggggaacattgcggggggttgaaagggtagcatggtgccaagcaaattaaacatcttcccctttttcatttttgaactacacgaaacttaactacatcgatgtacgaggtacacttggtttttttcatctctttgccattcacatttcggcttaatcctcatattctcttccatccggatatctcatcatcccctcaagttcctttagatctggcattcccgatggccctggcatatacaagaggttttcccggagggtcgtgccattccaccatatttcgttcttgtgcagcgcttccatgatcttcggcgcgtcgatgtacgtgcggatctcgaccatctgaccacgataccaacgtgtgaaccaaacattgatgatatcgaacttgtcacctgtagtgggtcagcaactcagcaatgctgaaggcaggaagatttccttactcaccagaattcatcacccctttgaactgaatctccgccactgaccatgcagcgttacacccgccatagattccctgggggtggatttcaaacagatccgcatggtcaaaaaacaacatgctgactcgacgcagagcattgacgtagaagtgcattaggtccttgtagtgtccggcgattgggtgatgtccgacgacggtgaagctgacatttttgtggatcagcgtgaatagcttgctcatatctttctcgagatgtttgaacgagtcccaaatgtgcggttgagacgcatatttgcaatctgtggatgggttctcaaatttgaacccttctcggtcatggggtattgggtcgtccacaactccagtgccattgcatttgccatctgggtcaacaagtccagtgccatcatcacatcccgatggcagaagtgggctctggctgttgtctccggggattgagagaatggagcgtccaaaagtcgccgagggcaggagcaatgccaatagggcataggatagatattgagttaaaatcattgttcaatttttgcaatgagaacaccagaggctagctgtcttgatcattttccctcgtatacagcctggttcttatatctggtgctgcctgcatttcattaatgcgccgtatgcccgtggccgccagcgttgctttctacattgttaccctaagtgtaaaaagactctctgtgtgacacaaccaaacctaccgaaattttgtaattgaacggcgagtttcctatacagaagaccgggaattgagcgtatccgagtggcgaatggcgcgggcaaggtgcagggctactgcagtgtgccattggttgtggcaatagtgtggtgtacagacaaaatccaggccgttaaaccgcctcgatgggtgatatttcctatctttggctccttcgaatttatgtaaatgtgatgatcccattgaaaggctaaatagttctctgtgcctgatagataccattgtccaggccgaacccggcgattggatgagtcagatctaagccgataacagaatttgacgccctccgattggccgacaccggcaaagtcggtgagagcacgtgcccacggagtcggggtgaaaaacctcttgtttccttcttttccgtcttctttctcattatttctctactccagattttcaacgcaaaagatctccatgttgcgctaaatagcaaccccctcatctctctctaccatactctgactaccacctgctagtcgcgcttatgtgtttggcaccctcgatcttcacctcccaggactatatctcggaccacctctggaaagccaacatcaactgaacagtacaaagcttcctactgaattacaattgttacttataaaataaaaatgatctccaacctcttcaaggcaatgcctgcccgggcttctgccttcgcctccatgagccgaacctctggtcaggcccgcttcatggctactgtgcgccgtgccgctatggagcctgctaccttcactatccgtgatggtcccatgttctccggcaagtctttcggtgcccgctccaacatctctggcgaagccgtcttcactacatcccttgttggataccccgagtccttgaccgatccctcataccgtggtcagatcctagttttcacccagcctctgattggcaactacggagttccctccgccgagaaggatcccaatggacttttgaaatacttcgagtctcccaatctccaggcagctggtgttgttgttgccgatgtcgccgagcaatacagtcactggactgctgtccagagtctgggcgagtggtgtgcccgtgaaggtgttcctgccatctccggtgtcgatactcgtgccattgtcacctacctgcgtgagcaaggctcttctctggcccgtatcaccgtcggcgaagaatacgacgccaacgaggatgaggctttcactgaccctgagcaaatccacttggtgcgccaggtcagcaccaagcagcctttccatgttgccgctgctgatccccactcccacgttgctgtcatcgactgtggtgttaaggagaacattctccgcagcttggtcggtcgtggctccagcgtcactgtcctgcccttcgactaccccatccacaaggtcgcccaccacttcgatggtgtcttcatctccaacggccctggtgacccaacccactgccaggacaccgtctaccacctgaagcgtctgatggagacctcccaggtccccattttcggtatctgcctgggccaccagctcctcgctctggccgccggtgccagcaccatcaagttgaagtacggaaaccgggctcacaacattcccgctcttgaccttagcactggtcgctgccacatcaccagccagaaccacggttacgccgttgatgcttcgactctaccatcggactggaagccgtacttcatcaacctgaacgaccagagcaacgaaggcatgatccacaagtctcgtcccatcttcagcacccagttccaccccgaggccaagggcggtcctcttgactcatcctacctcttcgatatctacctggactccgtgctgaagtacaagaacagccagactggtctctaccctcagcgtgacagccgccccagccctctgctggtcgacctgcttgccaaggagcgcgtgggtgttcagcccaccattggccagcagaacgtggtagccgctgccgctgcttctgctgccattgccgctgctgcttaagcatgtcaacgtattgcagtaggagttctggtttttgagggttcaattggttgccttgatgaaataattttacttttcgtattttttgttcatagattcatgcatggcatatgaaatcaacagcattaagaccatattttcatgtccaagctctttgtagtcgtatcaatattttcatcatcgctttcgatctctaagttctacttagccactatagataccacatcctcatcagcaaccaaatgtcccaatcctacccgctgcggaacatgtctcgcgctcgctccccacaccaatgcatacttaaatgtgtccttaattgtgcgatggatctggtcacaaacatcctcaatggtggagtcctttcgtacgatgagcgcctcatcgaatttaggttcctctccctttctaaagatacgataatcatcagccatgtcaatgaacctaaagtcaaggatataccataccgttttgtgtaaagccgcattagtctcagttccttccagatgcgttcgacaacgtcttgcacgccgaggtcaagttcgcaactcatgacggctgtgtgaggttcgcgggcaagggcatcaaggaactcgaggccgatgctgtcgaccttgttgtaaacgtaaagactggcacaaaaggagaaatattagcgtttgacagttggatatcaatcatgattagtgtcaatcttaccagcggatgtacttccggtggtccttcataatcacatcgataaagtcgtcgatcgtggctataacggagccgcaattagtgtttgggcctggctgtttgtattaaagcatcacgtaccattctcatctcgcacgagcacctcgcagttgagaattttgtaatcccggagcacgttgtaaaccaacttttcatccaaatgctttgggggcgtagcaaaagagatcttcatgccaccggccttcttgattttcaagtagatattactaggatggtatcagtatttcagtctgcgcaaaacttcggatacggtataacatacgggggctccttgttcaaccgaatgcccacggcatccagctcggcctcgagcaaggctcgctgttcggcacgctttgtggcgtccaaaatcatcaagatcaaatcacttgtctagaagcaggaattttgtcagtgtttctgtactctctcctattaagaaagttagcccgctcacctttgcggccgaaatgacctgccgaccacggcctttgccctcggaggcaccttcgataatacctggcaaatccaagatctgaatctcagcgccaccatactccagcactccgggaatagccgtcagcgtggtgaaagagtaggatgcagcctcactcttggtcttggtgattttagacaggaatgtagactttccgacagaggggaagccaacaagagccactcgtgcatcgccgctcttgctgacatcaaatcccgcaccggggccaccgccagcacctcccactggctccaagagctgggctcttagccgggcaagttttctggaaagattgttagtttatatttgaaattgaagttagagaattcagactataccctttcagtagacccaaatggtgttctgatatggagatttggaaattaggtcatatcctcccctgatcaaaatgatatcttacctgttgccttgttctctgtgggtcattagcggggtgatatataagtctgaagataagaacacttactctgcgttcgacgcatctcatcctcgatcctgtaaaagatcagtaaattaggccatccagcaattaacaagaaactgactccttgatcttttccgtgatgttcaccatcttgtcggttgaggctcgtcgcctgtgaaatcactaaatatttttctctggtgcttcgttgtgcctcagagagggaaataccaaatccgatgtgccctggcgcacttgccaagccttatgtaagcacctcagttggaacggtccaagacgtcgaccttttttttgaagctcaagcttaaccttccaagtcaacatctccaacacaaacacgaccatggcagatacatcggttgctgagccaccagctcccatttccaccacccccgaaacccttgaagtcaatgccgaacagacaattgtggcaacaaccggcgcggacgagactgtgcaaggagagcagcagcttcagtcggtcaagaagaccaagattattcgcaggaagaaacgcccagcgaggatacaagtcgacgcgtcaaccatcaaagctgagcctgcacagcagccgggactcgactataatatttggtacaacaagagcggcgacaacgacgacaaatatggcctcagccagcctgcgcctagtcgctgcaatattgcgcgtgactcgggatacactcgcgctgatcgcattccgggctcctttttctggtaggaaattttaccattgcgcatcgcggtagacatttgctaatcctttttccgtcctatctagcatacattttgcgcgaggcgtctgcgtgaaaggtcaggactgtgaatacctccatcgtctaccgacgattcacgatatgttagtgattcccatgccgtacgcgattcgaggattcttctactctgttggactcgtcggatacaaaagaacctggctaatcaatgattcttaggttcaatccaaacatggactgctttggttagtctccttgctatttgattttaaaacaggcgactgactccagactatagggagagacaagcacagcgattacaaggaagtgagtatctctttgtgactaggagatgttgcttcgctatgaacatatcgctaacgctacttgaaataggatatgtccggagtaggctcgttcacacgccaaaataggacaatctacgtgggtcggattacggtttcgtgagtacctcgaaaggctatacttcgtattgttgctaatcaacatctagcgatgatatcgaggaagtgtgctcaaggcattttgcggaatggggtcaaattgaaagaaccagagtacttaccggacggggcgtggctttcgtgacctattcgtcagaaagtaatgcgcagtttgcgtaagataccccttcccaagctctctatttgtaccgaactaacatatgactaaagtctagctgcgatgcaaaaccaaagcttggatcatgaagtgagttcaacatttcaatccacaagatgtgttatacaaaggtactaacaacaagtaggaaattcttaacgtacgatgggcaacggtcgacccgaacccaatggcacagaagcgcgaggcacgccggttagaagagcaagccgccgaggctgtgcgccgggcactacccgcagcttttgtagcagagatcgaaggccgagatcccgaagccaagaggcggaagaagatcgagggaacttttggactacagggctatgacgttccagatgatgtgtggcatgctagaacccgtcaattggaggatgcgagccgggccgctcagctagaggcaccccaacaaccgatgatgatcgagtctgcttcggtttcggtacaggagcaggagcagcagcctcagagtaatggcatcttctccagctcagctctcgcagccctacggggtcttaatggcggaacggtgacgacccaggcacccaaggctgttggtggaccgttagtcggctacggcagcgacgatgagagtgactgatttacgtgcagtttgtgcggcatcctaatccatcatgattgtgaattttttcatgtacaacagcaacgatacctctgtcaaaatgtttatttctctctgcgtctccatacaggatatccgtaaaatattatttctgggcgtcattcatcatcactatgtatggtatcatcccgagcactcgctaaaacacaacattgagagcgtgtcaaccaaaacgaaatatatccacccataaaccaaatgcaaacaccacgagtctcatcgatccgagacttatgcttaacctaactccccttcactcttcctcccatgagatcaatcagtcgtaaattcatttctcgctagggtcccaggtcatagtatacgcaggagcctgtgcggtagttgtagatgaaagcattcgtgtagctttctatggtatcatttgtgcgactctccatggccaagtcagtgagtagctcatgcacttgactaagatacttccgctctgtcagcggtgcgttctggatcacgctgcgccagctctctgcgtcagagagacgcgtgtcgcgaatagcgtcgagaacttcgtcgcgggtgtcgatggctgcgacagggccgttgcgggcgttttcggctacttctcgagaggaaagaagggctagaacacagtgtatcaattagtatactggactggatccccacttgaagcctgaacatacctgactcaacaatgttccttcggttcgtcttcttgtttcggtgctgggggatgaggatgcgcacatcattggcccgttcctggaacgcgagagcctcctgctggctcaattgacgggactggcggggatcaggagttccctcgcgatactggcgcgcctgcacttctgatcgaagccactgcacaagttcagggaggcggatatcgaattcttccttgcgcatcagattccgaactttaaacccacgctccttgctatcttgcttggcgattacaatgcaccggtgattggagtctttgtattttgctagaagctcttcaagggacgaggcatcgactgcaagctccgcgcttatgttgttggaccagagttcttcgatcagtttaactcctgttgtacggaggactgcggggtcaaagctggcaacaagtacattacactttgaagatcagcaaatattacatcaaacgagttcggatggaagtcacttacccgacgggctgtccagtacaactcagcacttgtctctgaatctttcgacggagccttggcctttaggtaatcaatcatcgatgaccgtagtagatcggagccgaggttgaaaccaacagcatgtgcttgaggtcgatttgataagccatgaggtgagaattcctgaatcaaccggtcatatctgccacctgcagcaaacacgccgcgtcttttgctatcaaagatacactggaacagaatgctaccgcggtagaacttgtcatgaacgctgctgagtgggttgatataaatcttccgtttcacgccgaaactctgcaaataggtcatgagcacgttcaaacgagcgaatattggtgaaatccgctccgcatattcagttccttccatgataatctgaagtctgcgttttgtctccttcaatgagtctgtatcatatccattagcgtattgttcccaatatgagaaagtaagcttaagtacctctgaaatcgaaacgggcaaggtcatccaacgaagttgaagcaacaccaattgccggggcccgaagttcacttcgaatcttttgcatgttatattttccaacattcagcttactgagaacctcctttgccttggggatttgagtaggcgtgacgcgacaaaattccataataagctggagtagatcggagtggttgacgaggaagcacatcggagtagaccgcagaggtgggaattcctcaatgatttcgtccaaaactttgatcacttctgcctcttttaaggctagatccagggtgttgtgggacacaatatcaaagtcaacttcgcggtgagtttgtggttcgccaccatgtattgtatccctgtagactgtgccgaacgcaaatgtcttctctagtgagtgatcttgtcttggaattgctcgtgcgtttggaagtgtgagatcatatggcagctgtaaaagattgccagatgcatccagcacacgtactgcaccgttgttgtaatgctgagatcgaggaaagagcatttgccttgttgactcgacagcaccatgtcttcgaaatatcgaggttagcttcttcttaaccaagccctggacaagtagctcgttcgcggccggtactgcatgtgagtctatgtcccaagcaatatcttcgaatttcttaggcgactgagaaaagatagctgatagaatctttttgtagtcgggtgaatttggatccgagagcagatgcacaatagcccgtctgaatgtctcttcttcgacctgaagaggtatctttccgctggacaaaaggtcggaggctgtggggcgttcactcggatcatggctcagcagagattcgatgatctggccctggagcaacttatcagattgctggaaagcgggcggaagagtgtgattcttttcacgaatttgtcgaagagtttggtctcgttccatgccagttggcaatgaataacacatctcgaagaagattacaccgagcgaaaacatctagaatgcgtgagcaggtagtcgtgatgccagttgtatattcactactcacatcgactttctcattgtagtgccccgaaacaactgacttcatctccggtgccacatagtaggttgtacccaaactacgagtgaaatctccttcgaagtcggcggctgcggacgaacgcacagccgttgtgaattggccacttgttgcaagaccaaagtcaccaatgcggggattgtttgcaacgtcgatgaaaatgttgtcaggcttcaagtcacggtgtatgatgccgtgactatggatatggctcaagccatcgagaatttgccggaagagacgccatgaacgctcgatatcatcgcacaaatcatcctttattagatcgcgcaaggtctagggaatgttagtctagaacaacgagcagagcgatgttaaaacacttacatgtttctcacagtactccatctggatgtagagtgtcgttacgataggcctggcataagagccagatctcgctcggctgagctcaacttcctccacacttccggcatcaaagtcgctatcattttcatttaccctgttcctctctggcgtctctggataagcggggtcagataatgttccttcgttttcatcatcgctgtctgatgcggcaaattctatttttggatatccgctggagctgatgaaatcgaggccgcctgtactgaatccatggtcatggctagcaaacggatcaccttcggtggaggacatagcctcttcctccacgttattgaagtcctcttcaagccaagcagcgtagtatcggacaacatagggatgattcagccgagatagcagcatggtttcggaaagggtgtctttcaacgctgcagccgatgtttgagagatcttctttatcgcatataaccgaccatcgagcttgttccgggctttgactacctgcccaaacccaccacggcctagctggcctgtctcgtcgaagtcttgatgatatcgtgagaaagccggcacgggtccaaaagagtctaaccgtggctgtctctgcatggacacagatcccgatgccctttctcgcatctttaacggcgcatccacgcggaaaaactccgacggttggagctggaaagcagtcggacgctttttgggatttgggcgaaagaattcacaaagcaaatcttgcaggggcggcgagagccccatagacaccatcaactgattggcggaggtgtacctgagaaggacatcctttccaaagcccatctgaagcagcacaattccaagatcccagacatcagtcttcatggagggagcagaaccttcttgtgtcagctctgggggtagccaaagtggtgatttcgacgccgcgaaagaggtttttctgctaagagagtcgggcaaggcttcttcgacgttggactgcagtttaacgatagtttcaccagaaggagtcctgaacaagaagactcggccacaatgaatgttgccatgcacaaagccgctgcggtggtagaactccagagcctcgagtaactgaatcatccagccgcggagcatgtcagcagctacggtgcccacaatatccaggagctcggaaagggaacccttgttggcatactcgaaaagcgcaaagacggtccaagaattatcagatgaatccaagtggtctattgggcggttgattttaaagcccacaaattcaacaagattgggatgtcgcaatcgcttgattccctctaacttgtcctcactagtgcgcatctgctcacggaatgtcaatccttcggaattattctcaacgaggcaaagctccttcaacacaagcagcgggacgtagcatcggctctcagacacaacaggcctgacggtgaaagtctttctgcattgttcgctttgcagaagggtcttgccatagacggcgcggaagaccagcggctgctcatcggtgtcgttgacgaccaacggaggatcaaagcagatggcgccaggtgtattttccactaggtcatcaacataactcatatccacgccgccagatcgactctttcgtctcataagacgagccttgttccgctgtcgcatcttgtcttgaagcatttcctgcaatgcgcgctcttcctcgacagctgcagccttctgtttgcgaagtttctcttgtttttctaggtctgcgcgctgaagagcagccgcctcttgttccatgcgctcctcttcaaggctgggtaggtctttgtcctgtgcctgtgcctgggcaacatcctctagaacatcttggatggacaccgcaagctcgtaaatcatttcactgccgagcagagattttggcttgttgcgtagaatttcttgtatccgggagcgcgctccatcgcgaaagccgtcgaggtttcctggtgagaggttggggattgttttaggatacgtagtggggagttcgaccagcaaaatgaggagtacgtctggattcgaagaggagcgcaaatgaagcttgaatgtcacatcggaggattgctagagtgtatgggttagtgaccacgaggggcccaaacagctcaaagagacacccacctgccaggccgaccgcctattttctacttcttcaaagtcgtcgccatagattgagcgcagagcttccacctctgtctggtggatttctcggtaattggttgtaaatacgggggacgtcacggaggaatcagacgtttggtttttctggcgggagggcttcttcctctgtttgggagacatcgcggggcgtggcgagagctcgccctacaagcgaccctgagcgtcgtgcgacatgagggctagtaataaaagatgaaagggttatgggaggttgaaagaaatcgggcagtcttttttccctcgcctcttgaggctagaccaaacaggcggtcagataatacgcccttccacttctggggtggagatgcttagtataaatgacgacccagttggtttaactgtggatttatgggtttaccgcttgtattctactgtggtttaatttcgtctcatgcttcttgcgtcttgtgtttatttcaagtcgtttacgagatagcccatgtgtctatcgacttgtctatcatcgccgtcaagccaaatcaccagtccctgcccaatagtgggcccagatatcttgagataatgagctggtgagccggtgagctggcatactgagaagggtggcaattatcgaccctgcagtcgatcatctctactagtgttgtctttgttcctgtgactatccacaatcgaagacatcgagcaacaagctgctagccacagcaatcattggtgcgtatccgcaatgattccactatccttggccctaggtccaacacacagacccatctgcaaatgcgacgctgctagcggcaatcaggatccagcccaggttgagggcgccgaaatacgaagccacatatatggcagccccatgaagatgtctcggactccatagattgacattagactgtcgggcctctgcttgtccaccactctgtacagagttaggtggccggaactggaagaaagtgagagcatgttctggacgtaggatggcgttgacaccgaatccgacaaatgtggttgcaattgcgcgggcaatcaagcggagaacaaccaaacgggaaagaaagatattgtcatgccaagccagtcttatgtctgacgtttgcgtagtgtctgcagtggcttgcagctttcaaggacttgagcgccgtaagggatcacagtgtagtcttcgaagtcatgggaaagacaagaattcgggggatttcttatataagacctgaagatagcatagatatttgtaagatgctctgagaacaatcagaccccgaagaggaagaattgatctaagcaaggctggtacatagttgtagactccagatatgccaagtaccccaggagggtacatatggatgtccactcctctgtacacgcacatgtgtactctgtacacacctgttatgaacaactcaaggcccacaagcgaattcttctcggaataaatgtggaacaaaagaaggtgaagaacttctcccaaatcccaatcctcaaaagtccaaaaccgagtgccaagcgtaaacaaaaggaacacgagcttatcgataagctttttccgaccgcgccgaccataaacatccattagactttcgattgggcttgaacttcgaggtttcttccaatcccggcagtcaaaatgctggactggatcaaggggaacgatcaaagcacacaggctacaggtgtggtgattacgttgacctttgaagccattgctctaacgtgatgctacagatgactctaagctgctagaaccccctgagactccaggccatgtctttgccattcgtgcgttcaagagtgctctgtttggcacccccggagcagaggacgatggaaaaaacgcgtccccgagacagtccggtcaccaacgaagcaaaagcgatacgacaacatccgcgccaactgagatcaagaccgacgcgaaatcaggcgacgcgacttacaaccccacgggatccccgacgaaaagcatacttgttacacccggaaccgcgttgcgtcgtaagacggtatcctttggcgaaagtgtcatcgacaatgaggggaaacgccccggctcggccagtaagccggccaagactccaccaaatccttccggagccctcagtacccagtggatgtctgggtcatcagatggaaacggcaagccgaggagcaaactcacccagacactcatgaatgcacgcgacaacgcatccaagaactccgatccggccaagtctgatgagaacacacgggaaacgaaacatgccgtgggctctggctccaaggatacgctcgatgaagatgtcactatcaatctggatgacccccactcagagtcaggcaagtactggaaaaccgaattcgataattatcgtgtgaaaaccaatcgagagattaagaaattgattcattaccgatcgattgccaaatcctacgctcgcaaaaaggatacagaagctatgcggctggccgacaagctcaaggaggaagaagaaaaggtcgccgagatggaaaggcaggtgtcacggcttgcttcttcgatggtcggggagggatcgacaggcgacaaggagcaactagttcaagatttgaccaaacaaaccgctcttgcattgcaatataagcagcaggttacctcgttgcgcagtgccttggaacgacatgatgttgtaagcgatgcggcaaatatcacacaaaagaaaaaggaagaacctccttcaaacaccccaactgaggagcttcgcaaaacacaacaagaattggaacaagccaatgccaagattgaggagatgaaaaaacaacagtccgaactaagcaaacttcaagacctcgcgcagagctcagaaaagaaagcccaagcactcgagaaagagaatgacactctgaaacaaacactggcgcgagtgaagcaggaaatgtctcgatatgaaggtcgacgaaaggacaaggaaacaagactgaagcagagagaagccagactggagcagcggatccaagaatatagagagaagctcaaaacagtctctcaggagcaccgtgcctcggaagagaatttgaggaatacttccgaagcagaacgccgtcacatgcagaaacagatcgaccttctgaagctgcgactcggttctaccgaacgcttcccggcactaccttccacagagcggcaattcctaagtcctcgcaaagacaacacagacgtgcaggcgtttgactttgactttggcgaccaggacattactgatcaggaccttgagaaacctgaagaagaacccaccgaagataccgagcctcccccaagcccgagtccacgctccaaaatacgcgaatcgcgacctgctctgcgcagtaacacactgggcacacttagtacaagaccgaatacccgagacatagtcgcagatgacgacgaggtgacacattatctgaacgaaatactcctgaagccgcaactcgaggcccgtactgcagcgttggatcaaatccccccgtcctcgcctcccgatatctcagccctgaagtcgttgaaccgcacgtactcaagacgccgactcggcgaaggccagcggctctatcggaatccgaacctgaacctgaacccccctgctgacgatgatactcggctcagcaaccgacacacacaacgcgaacgtacccacatcaaatcgaccctcgattcaatctctggtctcccgtctcgcagtcggtattcggggtatgccgtttcagcgggcgagcgcgtgggcaagcggtacgggtttactgatgtccagcgtgaagcgctcactcctgaacgaattgccgcggccaagtcacggctcaggcagaaggacagtcgtaagatcaaagcatttggaaaggagaatctttgaggtgactatgtactatggagtcgcctgatttggaaataaggcatagcttagcattatggggtggtgttcgggttcataagcgttactgtttttcgtcaccttgtttctatctacgttttcagcgaagacaattgttgtattattgaatcggtggctcttctagtctctcgatcgggatcgctcgcaggcactgttgccaaattctcgctgcctccgggattggtacaatggctaatgtatcatatcacacctttattcaaaatctagattaggtattatcttgtctacatccagctgtgctctttcactatctagttcacctacaaaggttccatatcgtatattcacccagtgtgcaacggaaagaacacggtcggtcgtgtagtgcgctctcaggccttaccgtcagagagcgacacgacggcccatttcccgccccaggcccacttacgagactcagcgccgccgcctcccggcagtgcgcggagcttctcgtcctcgccagcggggagaccgacaacgggatcagccttgcaagtgcggaaggctagaacacggatccccgacttagggccaagcgggccgatagcttctgtgaaaggagtggtgggatcccattgggcctggatattgttagcaagaaacacaaagcgaaagaaagaaagcaaagaacactggacttacatcattgaccaactttcggtagttcaggtcgcccttgaacaagacaagctcgctttccttcagatcttcgaacagctccggtgccacgaatggcatgcgccagtaaccaccctgggtggtccagaaagcgtgcggacgcaggatcagcttaccatcctggtggaactggctccactgctcgaagaggaatcgcacgtcggagacctccttgtcagaaagaggggggaatgtcttgcccgagccatcgatcgctgtgtaaaaggcctgcgggtcgaccatgcagttgagcagatcggagaaatccttcggggtgacgtctgacacaaaccatggcaggcgcttggggtggagcacgacactggtcgccagtccggcggacagcaagtatccagcgagaatgagatcaacgaataactcaaatccggagttatctaagacgatgtcaacgcggcggtcgccgtccttcttctctctccgcgccttttgcattaccccgaaagcagcatcaaggtcattgacaatgatgttctgctctgatgctttgcgcgcctcagacccctgcagtttctggatatcctcgtaggtgagagatgtcagaagtgacagatcggtggcattgccccataagcagatctcgcacatctccgagaagagcagcttctcggccgagtcgatttcctctggcgacttgttctctcttgcttttccagactcggattctgtcgccaactcacggtatctcgcagcgagttctagtacggcgggccgggacgacttgaatgtatccatcttctggcgggcgaacacgtcatagcccttccaatgcttagacaacgcgaaaagggcctccatgcggcggtctatgatggtcgttggtcagtattgccgaaatatatctattctctgttggaccggggttgggcttacagaggtaacactctgcataaagccaggccacatcgtgccagtgggggtttccacgctcctccagctccttgttatacgaagcgatatctggatgtccgtcgtcatccaggggactagccgcaatagacacgttaggtgaagctcttatatttctagcattgaggataaaatgactcacgtgagttgtcggtcgtgctgaagctcatacttcaaggaggccaatttggcgataatgcccttgccttcatttgccttctcgccgtccttgacagctacaacggtgcgatgaaggtcatcgatagcgccagtctagagtcgtcacacatattcagcaattgatccggttatcgattgtctgccaagctcacgatgatgacaggccaccgctcgttggccgagaccgaggcaaagctcgacttgtcggaggtgaggtactgagctgctcgggttagtctaatatatttatggccgaccaaggatacttacgagtcttaggatcgaattccatgactgctatgcaagatgtatctagaccgagggcaaaaagtcaaagtggcagaatcgaggggagggcgcggggtaaaagcggtgtacaatatacagttggcgacgtcagagctactcggagctactggaatacatcattgcgcataaatacattgggaacatcaattctaggtagatctcgtaggcaacgccgcgcttgaaaatcagatatgccatcacattcccgaaagaatagagttattcgcgtacgcctaagacagttagctggggaacttgattagatgtttaggtcatggtcttaccatcggcttgatatcggggtgtggcgatgccccaaagacttcatatgcaagtttgagttcagggccgatgttgatgtaagcgcccttattttcagtcgcgtcgcagtatctgggagcggagaagacggtgatgcaacgaccatcgtgttcaacgtcgtaaccgcccatccgcacctcgtgggagcgaatgatagcctccaggccattgttttcacagaagcgcttggtcacatcagggccaaattgaagaccgacgccacgcttgctggggccgcggccaacctcgggctgcgggtcggtccagagcatctccatcatcaggcccgcttggccaggctgtcgttggttatggcggttgagcttgcggatatcatctaacttgatcttgtcgtcggagaagagaccgccgtgcaggacaaggtacttctcgccgatcaaagtggccagcggcagagccgagaatgactcggagaataccttgaagacccgctcgttatatttagccttgcactcgccttcgaagccgtagaccttattcatatcatccgtctcgtggtttccacggttaaggaagagaccgttaggacgcaaccacttgtatgcataaagcagcagagcgacttcgcaggaccaggagccacggtcaacaaagtcaccgttgaagaggtaggcgtgggtatcggagggggcaccatttagtcggaagatattgagcaaatcgaagaattggcctaaacaatcagcaactgcttcactcaccagcaagacaatacataccgtgtgtatcaccgcagactgtcaacttcttgcccgattccaccccaatttcgaccatcgtaggctcgttgtatacgatatccttgacagccttgatgatctggaagacatatttgcgatgaatattctttccgtccttaaagcgctggaccatatcatcgaggaactcctgcgtcatttcctcgccaaggcgcacaccatcataaccgtcctcaacattgatagcatcgatatccaaatccgcaaaagccgaaggcggatctgagatctcaatggcccgctcaaactctctgcggcgcacgagcttctcacactcagcagccttcagcttagcattctggttggccggttcgcgtctcaccacagccttgaaatccttcaaggcctccttgtaacttagaatggcggtattggcgagagcacgtctccagtaggcctgtggtaaatttggatttagcatatatcgccgcgaccgctcaatatgcaggcacaagttgtctctcttgccggctaagaatgccgactaaccttcacatagttgggatccaattcgattgccttggtggcgtcggcgatagcaaaaccgaaggcttcgagcttaatctgagcctataacagcaagaagaaaagacattagctatgccgatcctaacgagtgtgcacgcgactctcgggaatagatcgtcaggaacatacctgggcccggttggagaagaaagaaggatccttgtcgaatttggcaatagcctgggtataaaagtcgacagcgacaggccagtcatgctcagcaaaggccttgttgccctgcaccttaagcgcagtggccaattcttgatcggtagccatttggggcggagataaaaagcgaggggcacgagacaaggattatcggtgcgaaacaagggcgcggaggaaagaaggcaacgattatacgagccggaagagaaagaaagagaagccagaaataaataaaactcctctaaatccagtatagactaagagaaaaacgaaaaaaagacgagagagtggtcaaaaggaaaaaataaaaaagtgagagaagagaggagaggcttgttcctgcttctgcaatgttcttttttccccgatcgcaacgggccttggcatcgatccagacttgacggccacctcccatccatagctttctctctctcctcacaccctcagatctcctccatatgtctttctacgcccctccaaaccagcagcgcacgctgcgcgcatgcatggtctgctctgtcgttcaagtccacaatgtaagagctacacgatctccgttccgcgggcaactctaacgacccccggttcctctagaaattcatgcgtgaaggctgcccgaattgcgagagcaccctccaactccgggggaacaatgatgctatccaagaatgcacgtcgcaggtcttcgagggcctgattgctgtgagggatccggctgcgagctgggttgctcgttggcagcggttggataactacgtgccgggcacatatgcgaccaaggttacggggacagtaagtgcattctttgaattcctaagctctgttattcctcttatcaagcacgggttggctaattgtgtctttcgcgttgacagcttcccgaatacattatcaacagtctagaggactctggtattaaatatgtcccgtacgtgttcgaaatcattccactatctgagataccgtcgtcgtgatactaacggtcgcttgttccagtcgagacggaagcactggcgaagaagatgcatgaagcacctactctcaagtctttaacgctacacgaacccacccttgtccatacagtcttggtttcggataccctagcgcacacccattgattcaatcaagacatgctatatgagggtggtttcgacaattttgctggtcgttcggagtttcggggaagcattaccttctttcttcatatttattggactgcaagggcgtacacagcagattcagattacttaggagtttacaattccagtttctttagctgggggcataagataagaaaacggcttgcagagtatatatccctactctggccaatgattcggttgagtcataactcaatggtggacaagcacaatttccaggaatatacgttgcatttttgtaatgacatgaaagtcgtggcagcaagggaaaaaagtgaaccctgcaggacataaaagaaaacagaaaaaaacgctcattaagccaaattgaaaacgcccggacacttctaaaggtcattgccggcatttgtttagatgttctggacgatctgctcgatcttctcaaggaggatatcggctgtagtaaacatattagtaaagagctcttaagcacaagaaagaaggttaacataccgtggtgcttctggaagaccagcatgggacgcagacggatagcagagggaccacagccaccgacgttgacaccgaaggacttggccttggcagtgaactggtcgcgcttgggggtgtcccaggcgatgaaggtaccgtggtccttaccacggaggttctggaagtgctcggggtacttctgggccagaccggcgagaccggcgtagaggtagtcaccggtggtgcgggtgttctcgacgaggtcgagacgctcgatctcctggatgattccgcggaagatcagggcgcgggctgggtcgcccatccaggtgttgaattggcggtagggcttgttggggcgcagggcggggttgccgtagtagtagccggcggtctgggccttcttggagaaggtgaccatgtccgggggagaggtcaggttccagtggtcgtgggcccagaacttaccggtggcaccgacaccggtctgcacctcgtcgacgatgaagaggacgttggtgcgcttggtgatgtcgcggagaccctggaagaaggcgggcgaggcgtggttgtcaccaccctcggactggatgggctcgaccacgacggcggcgacggggttgtggaactccttgatgagacgctcgacctcggccaagcagcgctgctcctcggcggtgttctcctggacgtgctcctccagagggtacttcagctgggggaagggggcctggggccagtcaaaggcggggatgtcaagcttgtggatgggcttgctgcgggtggtggacagggagccgaagagacggccgtggaaggcagacttgaaggagagaatggacaggtggggagaaccagggctctggttgttcatggtggagagcagctcatcgttggagaagtcggcgccgacgccaccacgctgcatctggcggtagtacatgaaggcggccttgtaggcagtctcgttggcatcggaaccagccatggcggtgaagacctggttcaggcccttgggggcagcacggaggactccggtcttgagaatctcagcccagtcggaggaggggaagttacccagagcagggcggttaatcaaagcgcaggccatctcgggcgaggcggccacctgcttgaggtgggggttgttgtatccaacgggaatagaagcaatctgagcatacctactggggtcagttcctgtattccaattggctcgtggctagtgacttacacatcaaggagcttgtttccatcgagatcggcgatgctagaggcggggttagtcgagtcttgatagtgggttagggtctatcatactagttaccaacggactggtagtagtcggccaacatgttcaagctgcggacatcaaagacctcgtcgagctcggcggcggcggccttgttcttaggtccggggagtgaccccgagacggagggtgcggagggctcattggggaagaaaggcttctctgcacgcagactggcagtggtagagagagcgcgagctgccgggaggcgagctgcagagcgcagccgtgtgctggcacggaagaccgaggacattgtgaatgtgatgtgaagaggggtggtggggaggatagatgaagggtggagagagaatagcggtctagtaagctatccaatggagggaaaaggacccagatcaatcaatctactcgggcaagggcaagggaaggaggacggatgaaatagaatggaacagcaaccggcgcagggtggctttataccagatgcagttggagtatgctatcggtcttatcctggagctcagtagcttgtccccgcgtatgttgcttttttttcggtgatattgaccaatcgggtgcttgatctcgacaacgaaacgccgagcatccgatggggtatctggacgaattgagaaagtctacgctggtgggttcttgtcaaatctatatggtaagagtttccatataaacgtcccgaggggggctattgtgcatgtatttatctcaatggggacgagtcacgcacaacggcgaaagaaagaagtcgaggccgtcatgttgctactgtcgatcatcccagggttccgggcctctgcgataagctaatttgagtcttggcatctttttttagctgcgtgtatgagcatcgatgtatgatgtcttgactatatcatggttggcttcacaatttatagcacgtgtttaataatggattcgttgtttaattggtaacgcattggtcttgtttagaccgggacatccggtggatgtatccagacgatcctagtaaatatgcaatattaagttacacttgcatttatgtaaacgggaaatagaacagatgagccctaataagctgaacatcggcgaccttaggtcctttggctgataacgcactatttcacccaaaccaccaatcaactgggcttgtggtttagtggtataatactcccttagcatgggagtgtccggggttcgattccccgcgagtccagatctttttgttgccttgacaatgaggtcaattaggagtgcaataactagactatgtcgttggtgatatattttttgttttgggtgcgtcatggcttgacgtcacgctgagcatatatatcttttttccgtggttgggttttgtaggtaaattgtaggttgagacctatgtaaggactatatatatctttggcccgaaatggcaagaagacaacgccggaacctcattttaccccaacacctgggatagtctacagagacaattgatgccgttacatagtgaatccctcatacatagtaatatatatacaccacacatgagtacctacaacctagtcaacgaagaaaaccaagagcgcaccacgcgccgatcctgatccacccaatccagcaaagttcgaactagcgcaggactgtgctttcagcgcacggtcaaaccttgggtcgagggtgatcattgcttggaaaacgtgtagatctacaccgagtatctatactactataggaagcaattattgggctggttaagtaatcattagaatcatgatagtatcaaatagatgtagtacaagtaatatcgttatttgtgtgaagtaccccttctagcacaataaaatcatctaggctaaagtgacataaattttgatacaaaaaaagaaaagaaggaaggcgatgtactaaaacagcagttaacgcagctgccgaccatcgaatgtctcgctccgtcctgacgcagaggaggaggcagcactcgtcggagaggcatagaccatgccgctcttcatctcaatgctatccgcaggggtgacggcgcggccggtatcggatgtgatatcataaccgtggcccatcttctcgtggctcgggagtcgggactcaacccagctctccatctcgacggtgcggatgatttcgaatcggtcgctgctgtaactgggttggtggtggccgtcggcgacgagacgggatgctcgggagcgggcggttgagtaccagtgtctgtgggtgcgagaccgctggttgtaggaggtggtgttgtggttggagctgaggaggcgggggaggaaggctgcaatgagggggcggagtgctggggctgaagagcagatctggtgattgttagcgttgagtatgagcatgggtagcgcgactttggtcttaccaatcccaggctgatttctactgccgcggcgatcagcactggccatccaagccaggtcgcgtcgtagccagtcaccatactcttccacacgtatacggttcgcacggagccggctacgttaactatggagccgagggcgaagatggagataacggcgagtcgttggcgagcagggagtttcagactccagatcaacggcattggtaaagccgtgactaggaaatcggtgaagatgttgataacactggcggagaaaacaatcgcgccgtcattcatgcaatggtatgactcggtagggttaagttgccagtatgcgcggataggtctgtatgaaacattagcaacgattctcgatcaccacgacagcagacgacgcacgagcattggaagatactgataatagtgaacagcaaactcgccacgccaacaaagacaatggcgaaaataaacgccaagttatacagcgcaaagtggcccttcccgatgagtcgtcgacagaaccacaacagagagatcttggtgaagcacgacgacatcgagaacatgatttggaaggagagatttagtttctgaatagcttcgagctccagcaatttaatatcccagatatggcggttcatgtcccaatgttccgtggcgatagaagtgacgatggccattgcgatcccgaagaccagaccgatgacaatgagtgcatcatcgatgccggcgctgcatgtgatccataccctggtgtatagacggagggagacgaccagggaggccagggtgagacagacgacgttcacgatgaggacgccgtggccgcgcgtgggcgggtcgatatagtttggggtgggccatgagtccaggatggcagctggagggagcttcataatcgtatcggtgcaaggaagacgaagaataaaagattgggacaacaaactgcagcagaagatagataggtaacgaacgtgtctagacagatgccattgccataacccaagcccgcgatgaatgggaatgtcgatcaaaaagaaagagagtcagagcagaccgagggtacaagtgagccagctccgggtaaattgcgtctgttgaggaaaaataaagaaaaggtataccccaccgggggggacatggacatggggtactagaccgcagatataatacagggctaggccagacctttcgtccaatacagagctatacaccaagcgaccagagagacacacccacgaggcatagagtttaccccaagaacacaccatctcaaaaaggcgtcagtgctgaagcatcagggctatgttgtacatctccgtcgccaaaaagccgttccacgccatgtccaaaatggcaacacggccgaaggttgagtggaatggacaatgatagcagatccaatgtccccatagttccatcgtcggccccactgagcctttggatctggatctgaggcttgtgagaggttgagatggtgaggtggcatcgcgtgtgagagagacccctggctcgcttcacggaagaccacggactcccaaggctgtcgacttcgcttaaataatatattctggctctcacgtcaaatcacagtgcaatagggggaaagttaattgcattggctcgtaacaaagtgttaaaatctgcccctacggaggccgatgcgtggtggtccctgctccggaggggccgatgggttgtatgtaactcgttatatgaggtaggaggttcgttataatttagacaattgaatagatcataaccaaagaatatcaagtagaataagagggtagtatataactagatgtaactttactacttcacaactgtaacgttcagctcatcttatgatgcggggtcactcttccaaggttgtctccactctgacaatgcatctctcacgtaatatatctggcacgtgtaaaacaatgggctgagacaacgcctttgcccgctattttctgcacgctttaccgtctatgatttacaggaaaacaatcaatgactcttacatatcattcctactatatgggtatcattcaaacaaaaagagaaaagacaaaaaaatacaaacaaagacaaaacctcacgatcccatggacgcaagtcgaagtttcaattgattctcgaccaatctctgttcttcaagcgtcaatctgtcctcggggtcgatttcatcgacacaaagtttgatcttgaggatggactcggcgcattcagccttcagtctccccatcatctcgggatcggtcgcgaacgcagtttcatcaatcccgcctttgtggagactctctttccagggaaccagataccgttctaaggccttagagcccatgcgagcaacatgctcatcatcgagaagccggccggcaagctgactcttgaaaatcgtcttgttgtagatcttctcctcaacggtgccaccagccaccattcggtacacaaaaactttcttcttctgaccaatgcggtaggcgcgtccgattgcctgctgttcccaggtagggttgaactggaaatcgaaaatgacaacgcggttcgcggcctggatgttcaagccaacgccaccggatttggtggagatgagaaagacgtaggtcgagggatcgttgttgaagctccgaactacctcgggacgcttcgctggagatatattgccgtggaggagagaataattgatctgtgttctgtccattatttcccccagatacttcagtgttggaatactggaagaaaagactaggatcttgtccccgacagagattgcctgcttgactatctcattgaggatcatcactcggctggataggctcggttctagcaagttaggagcctccttgaacacatcatccagctcagataacattgacctgggaatgatttgctcttcgacaggaatggtagatgcgagattagatgcgaggttaggccccggattaggtgcgagattaggcccgagattattacccgggtcatcaccgctaggacttttctgtttaccggatgcatatttggtcttccgggattccagttccgccttgaaaagggccgggtgattacaacaaagcttgagaagaggcagccaagacataagctccgagcggacgcccgcttcattcctcagtgctacacctttgataaagatgttgtacacagctttttgaatgctggtcggctcgaagtaaacagagaattcgaactttggcggcaggtcatttatcagtgaggacatgtccgctcgctgtaccttggggttgatgatgcgaaggaacagctcctggcgctggagtgcctctcttcggtcaaacttgctactttcaatctgcgagccattttcgatgggcttgatgaattgatcattgaaatcagcaaagtctcccaggtactgaggggcaacccaatcaaccatccaatagtaatcttccaaaccgttggatatcggagtgccagtgagcgcaatccgtttccgagtgcgcaagcgggaggttgcctcggcaagctggctttcatggttgcgtaaattctgagcttcgtcgaccacaacgagagttgggctgttcaacacccagtttctgacatttttgttgaccgatggttgtccctgctcctcgttcatttctgcattgtcctccttcacgagaatgcggaagatgttatagctgagaatcagtataccaccctcctcattccacgcgcgaatctcttcgttccggtcaaggagctggttttttgtcggaatggctcgaaccttgccaagatggtggttctcgggggaccacattgcaaactcatcgcaccaattttggattagcgatgctgggcacagtagcagggttttggattgtcgcaattctctaggaatttggtcacgaatggccgggaattgtgatgccccggcagcggaaattgtgacaagaagggatatactaggcaaaaagggttaactgggtcccaatgaatgggacaatatcgcatcgcaatcatcactcacacttgcatcgtcttgcctaaccccatagtgtgggctagcaaacacccttcttgtcttttgttctcaataacctctcggaacataaactgaattccagagagctggtaggatttgacatattgcgcgatataggggtccaggcatatcatgggaagtcggaacgaaaccggccttggaatattttccttagaagcattcccttgggcaaaccgagacgcaagcactcttttagcctcggcttgtttgtctatccgttcttggccttctttctgggcccgagacaaagtgattttggggttggccaatttccgcttgccgttgcgccgaatggatgggttcatttcgtcgggttggacatgagaggacacgtccatccatcttctgcatctccagagaagatcgttcaaacacccaaagaattgcgcgaatcggtcttcatcgctgtcctctccgaccgccataagcgtagacttgacttcttttactgtaaaggcgccacaggggacttggataacgttgacccacgacacaaacaaggcggccattaacattgcagaatggctctcctcggcatccattccctcgatcaccgatgaattgtcaaacatgtgtttcagtgcatctcgcatatgttctcgatatacacagagcatgtaagacctgagatatttagaaagttggttgaaccgattcttcggcagacctatgagtgctttcgctacaagatgacgtcggtttccactttcttcgatagctgcccacagcataggcgagacatcgtcaaaaatactcacagcgtcgtcagtttcactgccgttgtcactgccgtggtcactcgtcaagtccacgaacccagtgttgaggcgcttcgggatgataggaaaagtttgtgcatctacctgaccctccgctttaccctcattcgagggcaaagttgtcatcggtatcagtggtgaagctggactatatctgtggacgctatctgtcttcaggcggcgcctcttggcgaccgggggctcgtaattctcttctttgtagaaaagatggctgaggtcctcgtctgaagaggagtcacggaacggtccatctcgataagctgtgcgataacgtggctcttcgtgatccggtgcagcctcgttctgttcgagatcggaaacaagggcgtcttccgattgctctgatccgccttccgattctgatctatcttccgattgttctgatgattcatcttccatctcatcaccagtgtcgtgcacgaaatccgactctgaactgagagtttcttccccgtccaaattcacattgggcttttctggccgcggggtgcgtggcggacgagcaacttttggcggcgggctagtttgctccagaacggatagcttccattgatccaagaaaatatcgatcacagtgggatcgaggcatgcacatgcttgaagtaaggacgagcgggatgaatgttgcgcctctgcgagtgctttgcggagggcttgagaacgtttctccaggtgggcgagccgtgtcgagatttgacttttcatgcccgggagcctttggcccctggtccagatttgaaatgctttcggcagctctttcggcaaccgaatgtcgatgaactggctcttccgtgtatcaatgtattcatcgacgattttattaaactcagtatcttccaggttcccagaagtatccggagaggattgctcctcatcctcttccatttcctcgcgagtctctgtatcatattcggcctcggagctagaatctccaagaagtgggaggatatccgaatcgtttggggggtaagtcttagcaagataatcaagaaagtccttgtgcccaaacccggagttcggagcaggttcattgggagtgagggtgtccgggagagaaggtgtgggtgggcgttcgatgacggtggtctccatccggcgaggtttctttttcgctgtttggggtagtgagagaccatcaaggacaggagcggagctgatgagatcatcagagagggtaaggtcgatgtgatcattaataaggggggtggtattcacgggatcatcgaggccttttggagaaagttgtccattggggaatgctttaggaggaggctgcggttgctccaactgataaaactttggcgatcgtgcctgtagccatttactggctctcagaatatactggcactgcgagataattcttatgccaaggtctctcacctgccattctgtgatatagagcaaagctgagccggtgactagatgttctcggagggaattctcgagagccataagatctgggcaagccagattataagaccaatccccggccctttcatgacaaaagaatgtaacaacctcatccaccgtccagtggaaagggtctttggtcaaagtcatgtttgctttagggggggcctgtactagatcagcgggctgcggtccagacgaaccagtgcatttgtcccaatgacgcgacttgacaagggtcaagtttggaaagatccatcacttaccattttaaggcccccaatgcaaattaaaaatgaagtcagtgcaaaccgaaggatgtaaaagccgacaatgaagcattgagctgatgatatgtcaaagcgaagtgaacgaggagctttcaaagaaagagagccgggtatacgataggggagaagagaagagaagagaagaaagaaagaaaacaaaacaaagcgaaggaatatcaatcaaaagaaaacacgccaccctctttcttcccaatctctgttacgcgcgaagctctttttttgtgccggtgtttgaataggcggtgagacattttaagggcaattattccgaaaaaggaaggcgggggactcgggcggtcgagtctagatttctgcctcaggtgtcggccaaatgccccgccaattacaaatccccaagaaccttgggggagcctcggcgaggttggaatctttgaacaatctacgcaacttgagaaggtcgtggagtgccggagtaaatcaattcctattcactagcaatatggcagaatcaatttattcaaactatccgccagatctgtctccagctcaacaaaagtttcttgtcacatctgtgaaagactgggctattcaaaatggtctcgctgttcgaccatccccagcaattgtcccagctggcctagatccaaatggggtgctggctacaaatgcaccggtgacattgtttcccagtccgtttcctcggacttgcttcgaggaagccactgctctccaagagatctacaacaaactttatgctacgatcacatgcaatgaagaatggctgggaaagattgtggaagagtaaggatatttctgctctagtatggtagatgttcattattgaccattttcaggctcattgaagttgatgactttgttttgaacttgtggaaggttcatcaggatgtgaagaaggaaggatatgttcaagacctgtcactgggcctcttccggtccgattacatggcccatgttctgcctacaggtgccacggctctaaagcaggttgaatttaacacgatctcgtcatcgtttggagggctttcagctcttgtgcgaaaaatgcacaccgagcttctttcctcgccgccgggttcctcaatcaactatccaccccaccctctgctacaatccgaggttccaccggagaacaccgcagtggaaaccctctcagcaggtttggcggcagcccacgaggcctacggggtgtccaagtccaccccggccctacctctttgtgttctctttatagtccaggagtcagagcggaacgtttttgatcagcatgcactctcaacacagctcaagaaagttcacaacatcccagtcttccgtgtggctagcgtcgatatcttggatcagacatccattcccagctccaactccgcacgaccattgttataccagcctcctcactcacccgactcaaccttcgaggtaacaactgtttatcttcgaggttactatgcaccagacgagtacaaatccaaccgtgactggctggcccgaactcacctggagcgctcggcggcgatcaagtgcccttccgtgctcaatcagctgtctggctgcaagaaagttcagcaggtcttagcagagccgaaagggccagatcatctcgcaagcttcttgaagggggttgacactacgctcattgaaagagttcgagatacctttgctccgcaatatgacctgtcagttgacagccagggccgcgatctagccctcaacccagataccgccatgaaccatgtgctcaaaccacagcgtgaagggggtggcaacaatatctacaaatccgatattccaacctttttgcgatctattccggaatctgattggagaggctgggtacttatggaactcatcaaccctgcagccaatgcccaaaatgttgctctacggaatgacggcgaggtccttcgaggacatgtcatctctgagcttggtatttatggtaccattctttgggaaagtactgggaagattttgcacaatcaacaaggcgggtatctgttgaggaccaaggggaaggaggtgaatgagggtggcgtagccgcaggattctccagcttggacagtgctattttgttctagataacttagactagatctgacatttacaatatcaacggttcattcatacttcagctttctggcatttcgtgtaagataatatctacgacagcatgagtctcataacgtcattctggagcagatgcacagcttctaaatcgcgtagaagggagaaaaagtatatatggagggctaaatgccgagacaactctatgcaaagatgggtaaacccacacaaagcaatatgagagattcttctttggccatatttccctgcagcaatcaattctacaatttcgaccgacaggcctcaagaccagatggtccatcgtagatctgtttctctaccagtcgagtgtttatctggacaacatattggttagttcacgtgtagatcaagaccccaaactgagaagccggggtacgtacgtgctgtttcccgagttcattaacattctgcacgccgagaagtcgcatacatgtcttggtctcctcagtcaagactaagatctgtcagtaagtcactctacaaaaaaaaaacgccgagtttcgctgatcatactttccagtgttcttctgacgccgtccggccccccggccgccaaaccccaaagcggagctcttcctagcccaacaccatgagcacccaaacaaagagccttgaccacatcagttcctctccggatcccgccatcgacccacacttcgatcttgtcgaagacctcggggcagtatttccggatttcgagtagggtgtggacagcaggaggagccgtgtcaagagaccgaccaccgtggtttgaaaggataattcctttgacctggggcgtatgttgcgtggcaatatacgcgtcttcgtgtgtctgaatgcccttgagaacaaccggaagatcagtgtgctttgccaaccagccgagggtctctctccatgtaagcgaagggtccattcccttgaatacggggtctccagactgggtgggtggcgcgccctcattgttgtcaccctggaatggagcctcggaagcgatgacgtttccgctgcgctcgtcgtcctctcttttcccagtcacgggggaatccagtgtcagggtcacgaatttgattgcactcaacttgttgattcgagccagcatacgttcgctcttggttcggtcgttctgcacatacagttgccagccaaagacttggcccggggcggcgcctgcgacgatctgctcgggcgtcatcgacgcgctgttggaaatgatctgcattgcaccgaagctgcgacatgcttctgcgattcctgcttcaccagtggggtgccctaggcgggccatagccgctggggaaacataaattgggagagacacgggatttcctagcaattttgtcttcaagtcgcattgtgtacagtcgatgaagacctttggccgcaattggatggagcggtagacttcgttgtttttgcgcttgctgatcttgtcgtcggatgccgaataataataggcccatgcctttttattcactattttcgtggcggcatcttcgatctcatccagattgagcaacgtttcgagcgcctttcgttccattttccctatgccgtctgatcccacaaagtaggaaaagggaaaagccgaggcgggaaaaacaggggtgcatacgcgccggatactttttcctttctgggattagtgccgtcgccaacggagaattaatatgcgaaggaacgacatgcgagggatgggaagtactacaaagtactatcaagtaagaaatatggaacaatatacaatacaaccgtgggctataggccttttgaacaagtagaatcaataaaccaccgattttagctctaggtaaccttctggccgagacaccggaacacttggcatttgttatgacgatgaatagtacccctgtttcaaattttaactttgtattctttttcgttggtatcattttgtatgtttttctatagtatgcattgtctactgtctacgcctgtctacaggcttgacgtacaattaagcgcttgaatgcatactccataatctgcagcacgagccctaagcccactcatgatctggacgattcgcgaccaaatcccctcttattccccatgaaatctgcttagaccaatagaaacacaatacaaaattctcctggagggctaaaattaaacatgcggacgtgtccgtcgactccaccatagtctagattcccgttgaaacgctgctgtcaagcgaataggttgcccgtgtttcattttgacttccccttcttttttcttccttttcttcgtgttgaggcttctagaagaccttctcttcccatattcgacattcgtttatgtatttcctttcttctaatatttgttgagatcattactgtctttccttgcttctagtcaaatctattgaaatcagaactgcccagttccgacttcatccaccttcgtttttttttttttttcgttttttccctttctttctggttttcttcatttcaccatggccgaaggccacagtgcccctgcagctgaggcgccggcgccagcagcagcagtagcagcagactgtactgctgcaccagtcgccgcagatatgcgctcacacgcccatcatcaaacggcaccgatccatgagcaggagcaggtctcctttggacccttgactcatcggccaacattcttggaacacctggctacctcgcgagacatgcaattcaagcttgatcgacgggacacaagcgagttggaccggtactttgtaagtcatggctgcgagatgatctatataaaacacgaacagaagactaggaaggatcatagacaggcaggctaacatactcttgacctagcatggcccccgaaacatggaaaagcattccaagtggccgataatgttgcgattgcacggcagtgtcatgccaaaaatgatcatgccgcttgtaactatcgctctctggtcgaccgctgttactgtcttttcgaagctggtccatgaccgtgagtaatccccaagtgatagatcaaagaacattctgagttatatactgacgcgaacaagtcggtatcaacaacatcctgctcaccgtgctaggtttcgtggtaggtttggcgttgtcattccgcagctcaactgcatatgagaggtatactattccctggtttttagcttcaactcgagctatacactaaccgcttgcactgcagatgggcagacgggcgcaaatattgggcccagctcattcaaacgtctcgcaacctctcgcgtacaatttggatcaataccggcgagagagaaggcgaagcaggaaaagatgacatcttgagaaaactgtacgtgatacctctggagtttatcctggtatcgattctaacaagctgtctatagctccgcgatgaacctcattctggccttcgccgtctcccttaaacacaagctccgcttcgaacccgatatcgcatacgaggatctggctggcctggttggacaccttgatacctttgcccgtgatgcccacgaccgcatggttgtcaaccctccgcctaaatccacttggaagtccgcaggagagtaccttggtatgtccttcgccgagtcaaaccctcgcaagtatgtcaaacggtcgaagaagcctctcggacatttgcccctggagatcctcaaccatttgtccgcgtatatggattcatgtgtagtcaacggtactctggtttcgactctgcaccaaggacaagctagtaagtgtctaaccccctatcttgtgtgctccaactctaaccgaacaaaagtcgccatggtggccaccttgaatgagatcttgaccggcacagaacgtgtactggacacccccttgcccaccgcatacagcattgccattgcccagatctcatggatctacatcctggtacttccattccagctctacaatgccttagaatggatgaccattccagcatcgattggtaagaacaacagaatcctcccccctacacaagtccaaaagaaattctaacagaccccgaagtggctgcctatatcatcctcggcttagccacgatcggcagcgaaatcgagaaccccttcggtcaggatgtgaacgatctcccgctggacacctactgccgacagatcgccctggaaatggatatcatgactgctgtgccccgaccaaatgtcgacgacttcatgtcgcgtgctgaaaacctcgttctattccctcttagccagttaggataccctgaatggaaagagcggagcgtcgacgatattcgcagcgcacttagagctaagatggtcgccagcccgtcgtcttcgtcgtctgctgcatctacaatttcggaaagcattcgtcccaagactactgggtcatcagtctgatcttcatcttccttgaaaatctgtcaccaacaaccagggggaaatacaaccggtaatcttcctggcagggtgagaattaattgtgcattttaataagcggcatcaaattgtttgtgataattgacaaacgcgtgggtcatggcgttttcatttgagtcatgttgactccaaaaatcaaccacaaaaaaaaagggagttcattcttgtcttgcagttgcagttggttgcgtacatagattgacattgtctccaaaatttatttcctttgtcctcatcgcacgcgaactttccaaagtgctagtatgtatgtcttcagccgccgatgtaggccaattgtctgtgtctcattccttcccatggagctagacacaagcttagtctcaggtattcgattattgcccggctcgcggtagggaaccaagccaatctcgatccatttggagctggcattgccgtcgcatatatcgtgggcggttactgcagcagccctgcagccacacccatgcctagtcccacgtagtatgcacaacatcaggcgtgaattgcgagtaaattcggatgggcctcgccatagcccgagggcaatactttgacaaagagtcaaaatatatagactagtcatagttcaaaatcggttctcgtactcgctttgaagcaagagtacagccagcaagtctagggaacgaataaatcggccccagagccagcaaccagagcacctaggaagtttcccttggcgcaaactctccacgcaacatctccagagcttgccgaattatttccgccgccaatccatgagctcacggcgctcacgacggctgaggcatcctcgcgagggacgcgaatccacataatatggtacttcgtggttgatggagatccgtcctcgatctttaggatgtcgatcggaatggctgttcctgtcaggccgaggaattgcgacaatgcggaggagaggtaggttcgtgcggagagggcatcgaggggttgcggtgcacttcctggttgggagacactaaaattgcaatgttagctttatttctggcagaccaaaaaagccgacggatagcttacagcttgagcttgaggtatgtccagggtggattgcgcgacgtgaaatggataatttttggctttggctctggcgctttgcgcttcgcagcttccgttacagcgacatttgtgtcaatttccatgtcgccgtgtgtatcctctgtcatactggctagctttttgatctgttcggggtggtcggaggttgatgttcgcccggagctccgccaaaaaaaaaaaaatcacagtgacggcgtcacgggatcaaacaagaatcgaatagagacaaaaatatgagctagcaagtgggaatcaacaggctttaaattcgaaatttatactaggagtctcgcgtattgacagcgtcctttaatatttgtgtcgcacgctgcaagtaggcttcttcgccgtcgtctccgatctccaaatcggcaacacacaacgttttctctcttgatttcgcgccacgaataattccgacattcgactttggaacgttaaatatctaacaaatggtcagatggaaattgtgactgactttattccctagacaagacgggaagcaaggagacacattaatagcccacctctgcgaagacacgcgacactgccatattagatgccccgtcgcgtggaacagcagccacggcaatatcgactctatcaatgccaacatttgtaatacctgcgcgacgagcagaggcgtttggcttcacatagcaagggatgtggaggttgaacagtttccgagaacacggggttttgctagggacgaggcggaggaaagaagccgggctggacattttcagtcgcggtcaagcgaattctacatataattgtggatgtggaatgaagaggttcgagtagaattgattgcagtaaaataaaggagatggatgaagtggccaagacagtcatcgtttagccctaaatgggcgagccgccctacacggtcgatcccaaactagtgctatcacgctttatccttagcatacagtcaagaaaaagttgaaactcataattttaaacaaggctcagcttgcgtattcggctcccacggattccggagctcaacaacaagccaagcacggccatcataacatctagaacgatagatagccacctctggatggtgaataactttggcaatattgccaagtctaactattacgactacaatcaccaatgtagcttctaagtagcatctccacgaggatcttctctagcctaagtgttccgctcgtagctttagggaacctcttcggggctcaactagcttggatcgaagaccggtatatattatcggtctcgatagtcggcagataggcttatatatatgaatattactacgacaagaaaggtccgggaaacaacattgatttatataatacaggatataatgataagttgataacaagtcttcatgcatcggctgcttcatggattgagacaccttggaagaatgtctccaggcgaggagtcactggctcagctttccgctctctgcaagacctcgcgtgtagctccagaaaaatcttccttcagtatataaagaagtacttgctaactcaccttgctcctttggttgatacggtagaagttgaaggtcacgctatccgtagagatcccgtagactgttatatctgtcttcacccgctcgatacagtcggacctcggggggataagggccaccgttagtataaatgggaaatgttatttaagtaaaggcaccggctgggaggataacgagtggcgagggaggatcctgccccggtccgacatagagtatctcgtcgacgatgcgactgcgatgccgcgatatgcgtccctcgggtgagtagtgatctccccacaaacgccgctctgaatagagaacaccagcttctaccggaacccaaaacatatatataggaacgccgatcgatggaggttgccgtctcgacatgagtctcgtcacacccctacttgccacctaggatagagacttctcctaggcactcgcttttcccggatccgcatcatcttccaattccttattcaggtaacgcagaactggttgcgggactgattagttggtagcaactcccacaggcaggttcgacttcttcttcggacattcgtatgtcatatgtcccttttccttgtacctcggaggctatcttggcccacgtccctaaatagcaagcccccattcaaaactagcaggcagatattcggcggtaaggtattcaaagcggcaagcagcccggctttcgacaaatattgtttcgctgcgtgctgagggctaagcgttacagcaccggcttgggcttgaccgtgtccaatcaaggcgattgtggtttcacagcttctttggggttctcatccataacagcaggtgtgcgtcctgtaccatggtgaccttattaatttcttccacggtttcgacccgagtccatccgcttttgccagctaacagcgctggccccaaaatatcacgtcgtcgaatccttagccattaattgtttcaagtagcagggcgggagacgatggaaacaccgagaaccacggtttgagcatatgcgcttgggaattgacaccgtgatcgggtgaacgtataatggaagcgtttggtctccttgatattggcagcgtcgaatcatacaatgaaactcgaatatataattaagcgcaaaggattgtggatgttgcatgggatggggtaatttaaatagaggtcgagaaggaaagagggagatgaacaagatgaaataccgacttaggctcagccttgaagtagttagtaatgagatctaagcgatggtatatagtataaaaatgtgtagagtaaggtgtagatgaaagacagatgagagatagatgagtatgatgtgatatatagaagagtgacaacaaacctatgagttagcttcggctcaggctgaaagaagtcaggaataggatctgggcgatgaagatatacaacatgaaggtcaggtcacatgactccatttcttgttcctaccacaaacctttagttccttcctttttcacgtaactaaagtcatctatcttcatagaccacctcgggcagatcaccattacacgatgggaccgaagaggcgtggagttcccttcccagcctagaatatggaaaaaagcacgaaaaatatggcaccaaactttgaaaggatttcgaaagagttcaaggaagcatccaaatccacattcccttttaagacattcattttcgatccagatcgcagactaagaccaattttgtggtcaccaaaggaaggtctacagcggcatcatctgcttagtacgacaatttaagacctgtcattcacaaatgatccatatcgcggtctccgaaaggagccagatgctcttctccacaatctatcgcagccttttccagctcttatcgcagaggttggatgcagtgagtcgtataatgaccttcttgatgacatgaatcggttactcattaggctagaagtctccaattcgcttcatgcctcagttgaaattgcctcagggcttaatatcaccaacgaggcgcttgaagtgcagtgccgtgcagcggcgcaaatcaaattgtcattcttgttaagtggatgacggcatattttttctgtatgtcttctttagaatcttctttggcatcttccttagcatattcttggtgaaaagcactcttcaagcacaacaggagaagcatatccatccaattttccggatgatagacccagtagccaagaaagatgccaataaagccggccagcataaaagacaaaaagagaacccaagatcttggttatgttataggagatttcattagggaccagtgtaggacagggtaatttaaagagaagatgagaagtagacagggagatggagaaaagaaacaagatgaaatatgtcgaccactaactatgtaccgaagagatgaagccgtcacccgactccgttagcacccacacctctattgcagaagagactcaagatctgcaacacgagtacctctatcctcggccttctttttcgtctctcggaaagcagcctgcattagactcctcttacgctcctggatcgccaacacccgctcctcaatactatcttccatgaccagtctccagactgtcgtctcccgcttctgcccaagccgatacacccgatcgacggcttgatcctcgatagcaggcgcccaccaactgtcacacaagatgacctggtttgctgcaacgaggttgagaccaacactgcacacgctcagacttgcgaggaggacagtacactcggggtcgttggagaatgagttaatggagttgtcgcgtttcacagactgcatcttgccatctacgcgggcgaacttgatcccgcgctgcttaaggtgtggctcgatgagatttaggaatgatgtccattggctgaagactacggtctttgttcctggtgcctggccctgagcagtcaggatcttgactagggtctcaatcttgctgcttggactgtcggggtcggcctcaacgatgtcagtgtcttcacccagttccgcagctggggagacgagtgtgttggtttccttgatatctgcgcggcagagcggacacttgtgttggcgttcgataacctgctcgatgcagccccggcaataggcgtgggcgcaggcggttatgacgggttgctctaggttgtcgaggcagatggcacacagttcttggctttctatctggagctgcagcatctcttgtagagcacggacgttctcgggtgtcagaggcacgactttgtgttcctccaacatgcccatgagtttgtcgatgcggtttttgcagagcgcccagtgattgcagacttgacgaagtcggagaagaacctcgagaagatgagagtatttagtcttgccatctttgtccttgaagtcgagaagagcaccctgggcctcggttctatgattgttattagcaaatttgttttcactgtgggtagtcactcgatacatactggaaagcatggtacttttcctgttcatgagcattgaacttgattctaatgagacgagacgtcatctcgggtagcttcaaattgataaagctcatatccttcctacgtcgtaagcagatggtgcccatgagagcctcaagcagcagtcgagcctcgggctctcctgcagttaagggtcgaatcaagacactgttgaagatccccaaatcttccaatccaccggaaaacttaaggaaacgtatttgcgcatacaaatccttcagagtgttgataatgggggttccggtcagggtccagcgggagtcggcacgtaagccacaagccgcaagggaggctttggaactgggattgcggatggtatggccttcgtcaagtacgacacgacgccagtgcaccgaaaagatgcccttagctggcgtcttatttgctttcgggttgaagtccagggccagggctccatagctagtgattacaacatcatacttggccaagtttgcagcttccttcttcccagagccgtgatagatcaagacactcggggcggtctccttatgggcgtggtcttggatctgatttctccagttgctcataacaccgacaggggcaatgatcaaagtggtcttagaggagcctgcagtgagaggctttgcatttgaaagaatcaatgagatgatctggattgtcttgcccaagcccatgtcatcagcaagaataccaccactggcgagggctggctccgtggctgtggcataatttgttgcgatattgagaaagtcattatttttccgcttccacaattgcacgatatcatcagagccccttgcgggaaggcttggcgattcttgcttgatcatccaagctagtccttggcgctgatatggaagcaactgggtggaaaggccggctggagtatcgaccatcggcaaattaaccaggtcagactccttctgtccgaaagtttccacaacctggccaatatctcggggattgaaggtggagctctggttaaggagttcctccaagctttcactttgctcgccaccaagtcccgttggaatcgagaggttcgcatactctgggttctggttggcttgccattttgcagctttgccaagagccatggcgcgagctttctttgcggcctccttctgctgtttctcggctgctttctctgccttgcgctcctcgtgctccaactcgttcatttggcgcacaggaagcttgtccttctgcattcgttgcttcagattagttcgtctggtaggctcgcaagttccgaacagtttcaaatcaacagggcatgtataatccccaatcgcaccagtcagcgtgccttcaataatgagatcacgagcatcctttgatgacgaacgttagcaaaatatcggaagcaatatgattggagattcttaccatatatgacgccaacttagctgccatctgtcgtggaatgtggccgatttgggcgcccatgacattagtaaccttaatagcattgctatcgtattgattattagaatcccgaattatgatgacccgttcacctgggctggcacgacccctgtaaaagcgtacaccaacgatctttgtggaaacgatacctattgggtgctgtttagtatggtttctagatcatccgtacacgagggaccgagattatgtggaaaggagcataccatagaggattgagcttgttaaagaggtttcatccacttcctgggacccttgaagcacatcgagcgcttcctcatcctcttcatcggcgccaactacttgcgacaactgattcaatggaatgaagtcggccgactcgccaaatctctggcccgaactagtatcctggtccaacggaatgtagtcgacagtctcgccgaatcgttggcctgggctggctttttcggtgttcaaagtcggggctgtgcggatgatttttggcgcacgaccagcgtctccggtagaaccgggggccttgcgttttactaccatttccccccggcttcacccaacaaagttgatataaactttggcaatgatgatgatgtggagattgtggactctcggagaagtgcaaatatgtccggggccctgccctctcaaaaaaatactctcgctatgacaaattcaaaaagcaaaagaccgcgcaaataactgataaagaaattgttgtctccagagcttgtcatatagagcgctaactatttgtgacgcgtcgagacacggcttcacgtgaccggggagaaaacggataagtcacgtggcatcgacgctgataactcgccgcccgctgagtggacgatcggttgacaccccgggggcgagacccacggggggtcttcacaagatagttgattagtcgatgtatgaggtacgataacaagctgattatcgcgggcaatttatcgaaaatattcgtgtcctgagctctctcaatgcatcatctcgtccagagtactgtttcaatcgtctggatatagcctggatatagcccggatatagctctttgtcgtgcggagaacaggccgacggggtatatcccgttccccggattttattcgttccaaggctgtcggggagttcccaccagtgtcttgacagccctcttcctacctctttgcaaattatgtccgtttcgcagctcaaagtgatgccgtcctatcagccattccaatgtctcatctgtcaaagtcgatttactcgacacgagaacctcaagcgacatgcaacgctacactcccgttctcaggccgaggcgtcgcttccctgcgacttctgccacgctaccttctcccgtcccgacttgcgcaatcgccacatgaagagaaaacatccagagcacgagcagcaccgagtgacgaaaaggacacagcgtcaaccagcacccagacaagacaggctgaattcttctgtatcgccgacagcaatctcgcctgcaggaagccagggtggcttgccttctcctggatctgtgcattccagtccaggagaggagacgaggtttgatagcgatgcaatctggcatccagtgatgcggtatcagcagcagttcgacagtggccaccccgcgcaaaacccaaatattcctgcgccggggaccgggatagccaagacgcaaccgacaagaggcctgttacaacaatcgacgacgagtgactctatcctcatcgatcagattgtccaggacgctacagatctggagcggagcttactattagggacatccttcctgaaacccaccactcaccttgacaaccaactacatccgatggccaccgcacaaaccgagccactcaatacaagtctagttgaatacaatttcgaccacccgattttagatagattatcgccaaatgacatccctcaactccaagacgattgggccccgagtcccttacaaatttcacgaggctgcaacttatttttcgcctcggtctctcatttcctcccctttctccattcctcgactttcgatccgacacaagttcctcctcatttggtcctcagtatgctctgcctcgcctatcaatacggcgaggacccggaatgcggggatcaagaaggctcaggcgaaagcttttctatacgttgctttcataaagctcgagctgtccttgcttctgacgaagagaggccggacgcttcgacgatgatcaccacactggttcaatcatacctgctccttgaaatctgtgccatgatgtacctttgtggcgacaattcggcgtgcggcctcaagatgcattcgcacataatctccctggctcgtgctggacgaatgacacaaccaatgactgttgagtctggtgcgaccgcagatttggagtcattatggcgggagtttgccaaagccgagtcgcacaaacgaacccttttcgcggtgcatcagatcgacgcactctggtaccaattcctttccattccccgctcaatctcacacctggaaatcaagcatgatatgccttgtccagaagaccaatggtcatcatcctctgctgctgaatgggcccatcggcagctcgttgcaagaaatggcggcccctcggtgacatacaccgatactgttcgacgcttcctttcctctggtgatgagatcgcctcccttccatcatttgatccgtacggcgccattaacatcgcgcaatttctgatatccagcgcccgggaaatctcaggctggtccacaatgacgggaatgctgagcatggagcgattcggcgcattaagatcatccctcgtcgcacttagcccgtttatctgtcccggtaaccactcggcacaaacaaagaacgtgactccatctgcaacttgggagactgccatggtcgagctgcagatgtggtcaccatcccacactggtggcattgtggaaggaagcatagatgccgttctcagtcagtcaacatatttgggaccgtctcagtttctgtgcgatgccaacacggccaaagctatacaaccacatgtcaactggttcttacgatatctcgacgagacgctcatgttggactctgaagcgccatgggttactctgtctgcgtacaaagcctttctgattgcctggcagctaatacatggtggcctgcctggcgcaatggaagttgtgggcatccgtgatggtgatatggagggagctctgatgtgggcgagaaaggtctttcaacgaagacggaaatggcagattgggaaactcatcttgtcttgtttggatgaattagagaaatgaattacggtcttataatgctttaattatttacgaatgtgtcttgtgttattattttgcaggtttgaacaattcaatcattcccaagtataatccactgttattttcatttccctaagctagaatatcccataaccatgtgacaataaacccataccgatcccagcaaacacgattaacataataacaaaacaacataatcattgatcagtacatttcgtaacgccagccgagctgtaccatttcctctgtgacgccacccttgacgaccttggctatttccactggatctcccgagtccagacgtttgttctcgcgcagaatgagccagcggtatatcgtgattgtgatagcgaacaagacagcagcacccataagcgtgccaaaggcaacgtagaaatgaggctctccaaagtataggtatgaggcccagatgttggacgtaccaccgatggcattgaccaaggcagaggcagccgctcgctttgagatcggtcgtgcaaggtgcaggttgatggtcttgtagaggagaagttggggaccgacggaggcgaatggcagtatcatcatggagaagtagcgggcgccgacgttcgtagtcgccatcgggatgatgtacatcgggatcgagatggcgatgcacatgaggatgatggggtagacgaggttctttcggtcggaccagaacatgaggccgtagtagacgatgccggcgaggatataggggggtgcggtgaggagcaaactgatggtgctggagaagttgagcgagctcacgagggtggggaagtagttggcgatggagccttgtgtttgggacagcatgttgcacatgatgagcagcaacagcttggggtctgcaagggctttcataaatcctttcagcacgctctcgttctctgtgccctctgcagcaccggcttcggactcgagacgccacacggcgcagtcacgctcaagcggggagaggatacggctgttgtgggggaattctggcatgatgcaggcacagatgatgccgatgccgacggtggcacagccctcgatgatgaatagccatctccagccgcggatgccgtggtgtccatcaagttggaggatggcggcagcgaaaagaccaccgaaggcattaccgacttgctgggcaatgtagagcccggcaatacgctttcctagctccttctttgtgtaccaggcagagaggtaatagatggctccggggaagaagacggcttcgacggctccgaggatggctcgaacagcaaggagttgaccatatgagtggactgccgctgtgcaagccgagatcgcaccccagatcgccacggcaccacagatgtacatgcctggtcgggagaacttcgtaatgatgaggttgctgggaatttggaagggcaagtagccgacaaatagaatggaaatagacgtggcgaattgctcagtggtcatgttcagatcgtccatgatgccctgaagttttgctgcactcaagttctgacgatcgatgtagttcagaatgtacaggatgccaatggttggaaggatgaagaagtcaatcttgcggacgagcttcttgttgatggcactgaactcatcgtcgctgagtccgcgaagggactctggcatacggttgtaggcatcgagttgcccttctgctgacgagacattgtcttcagccaggatagactctttcttgtccacagggaaggacatgacgacggtagtacttctgttgccaagaccacagcaggtataaacgatggagactgtgcagagtgatgcaggttgcaggctatgtcctccagacgatacttgagctccccctatatagttcgacgcagtctctgcccttgtcggcttagcgtagagtcattacaaatatccgatctcggtcaatagatgaccaggatacctgttcaaaaaatctcgaggcattgattggtggagattggtcgaggttcggtcattcgtagttgataagtgagacgtgtagataggactggagataagcgcaccaacgagcgtccaatggttatctgtccaattggaatcgactaccccggatggagagtttggttgaaatctggggtgcatggagctaacatttgggaggagctcccatattgtcgataagaagtttttgggaggtgcaggtggagatttctttcaaacgcagacgagcttagtggccatgtagaatatatctctaatcataggggcaactcacatacaatattccaatatttcgggagggccgctaattttggccgttaaacaagataagccactccgaagttttgccactagtctgccctaactccatgcaagagctccatgtttaccatgtcgaagctccgcattttagcttgatatttccaatcttagtctaaataaatgaggggcttaagaatacgtaaaccaataaatgatacttaagctggcataccatcaacatcttgtcttcatcttactcacaaacctccaacggacaataccaaaccatcacctctatttccaatatctactatcacaatggcttacgctactcccctcactaccacgatcgataaccctcgcttgagacttctcaacaagctcaaggccggcgagtacccgctcatgaccttcatggccatcccctccatccgccaggcccagatcgttgccttgaccggcgtcgacggtatcattattgattgtgagcacggtcacattggtgacgatgctatgcacaactctgtcgctgccatttccgcccttggtgtctctcccgtcatccgaatccgtggccctgcccacgatatcctcaagcgtgccctcgataccggtgcccacggtatcatggttccccaaatcaacaatgctgaagaggccgcacaaattgtcgcttcctccaagttccctcctcagggtgttcgtggccagggttccgctttccccgcaattgcccacggcctcaccactcctgagtacatgaagtccgccaacgagaccatcatcaccatgattcaaatagagacccgtgccggtgtcgagaacgtcgatgctatctgcgctgtgcccggtgtggacgttgtcttcattggacccaacgatcttgcccagtccttgcttggatacacacctgctcgcggtgacgagcctgagtttgttgctgctattgataagattattgctgctgcgcgcaagcatggcaagtgggctgctcgcatggttaacaatggtacagtagccaaggaggctcgggagcgttacgataccgtcgccattactggtgacaccaaggcgattcagaactggtacatggcagagtttgagattgcccgttcatgacgattttatgttaccttacgatagactttcatataaaaattttaaatagacaattttgagtttcattacttcttccccatgaaagtttaactacggataacatccgatctagctcattacgtgtcttgctcggtcatgagaatgagataaaagccacgaatccttttcaagccccgagacatattcccttgctgtctaatctatctggccggaaacagaaaaaaggaagaaataacaattcatttattcgcattttacatgaaaaaaactgctccaccgccgtgataatgaagattgcccttcgtcttgattggcaacacgcttgatttacgagcagaagcttaaatacgaagtagtcacacacactacgtaactaatatttctgacttccgggagtgatccgcacttgattaaggccatatttagttaatatagtagttaataattacatagcatatcgttactctacataatatgggcaacttgatactcagtccaaaaagaattttatttttcgtctatattgtagccattttcataatatcataatttatgcttgcgcgatgcactcaatctcaataacggtaccgtttccgggggcaaccgcctgaaggcatgagcgagctggcatgggttgtgggaggaaatcgatgtatgcctcgttcataccagcgaaatccttcatatcggcaaggtagacgttgaatttgacaacctgctcgagggaagagccggaaagctcgaggacctccttcaggttctgcagaacggttctctgtgtgaaagcaaaaaaattagccaatgccttgacacccgataattgtttgtgcaattgaacttacagtagcctgcttgatctctcctgtggcagtttggcctgcgcagaagacgagtccggggactttgacagcagggcctggatagcttggtcagtgatgttctttctttatttattccaatagaatgcaacatgttttgcggccagatactcacagttgtgaggcttggtagggaacttctcgctagagatgagttgacgagacatcttgttggtagtttgaaaaattattggagtgtgttgatagtgtagtttcaagagtgtgtcaagaagtttgaactccagaagtactagacaagagcttgtttaaattgctcgagctaccccacacgcctctctatccgaggcatgctgctaatcaagaagaggggcaattttcattatcacgacggaggagcagttattttttgctaatgatttattcgttatcactttcccagcagatatgctgggaggagttgagtggggagtagagtggagtgggaggagtgggaggagtgagaatgggaggagcacaatatctggagtcgattattgcggccatgtttgtaaaaaggtctctcagtgcgtgaatccccgcgcagtaagcaaagctgactatctggccgcaatctatgcttgtatataaatctaactcccggcaacacccggtggagatcgtattccaatccaggactagcgcaaaccttgtagattatgcttaagcgctaacgtccatagatgccctaaggtggaggagcccccgtggttccgttcatgataacgaaagatgacaaggcgagctgaaaataggaaaaatgtggagaagtttagcagggagcacccagaatggcaattatcatgcccagaatccagtggcgcactagcgtcgataaccctcctgctctcatctcatctaatccggatgatcatgccagactcacctccccggatatcggatgcacagatagggtttcatgtctctccattcgattagtataaagatatagaactcgatcagataatcttctgtattgtcttcagcatcgatcacaacatcgaacagtctttgaacattctttgcacatcaactaccatggccgtttctgctcccttcaatcctccttcggctgacctgcctggcaagccttttgtcccaacatgggtgcccccgccgatcactcagcaaaaggagaattttgctgagcttagctccattgatctttctttgctggactcggatgaccctgctgttgttgataagcttgttcagcaggttaagggcgccattcgtgacgatggattccttttcctcgagaactacggaatttccctagagcaggtaagtcttggttcttaggatattctgataccaacattgctaataacatctttcaatagctccaccgccaattctctcttgcccagtatctttaccaaaacatcagcgacgaggacaaggaacgtcttctgttcgatcctgaaactggtgtttggtcgggttacaagcacccttacggattcaaggtaagaggatctccctcatgcatcaagaaaatccaagcctatacttactctccctttttgtgattagcgcgaacgcggacctgaagacggtatcgaacaattcaactggtacaagcccgactggagcgacatcaaccgtgtgcccaaatgtcttcaccccttcatggacgagatcgaagagttcgccaactacctgaccaagtccgtcaaccgccgcctcctgactctcttctcccgagtcctcgagttgcccgatgactatctctgggataacgttcagtcccacggttgcccaactggcgagggctacttccgccatgctcttttccgccccgtccagaagaagaccgaggaggcatccaagggcctgcgtatgcacggccacaccgactttggtctgacaacattgctcttctctgtgcccgtctcgtgtctccagatttggggccgcgatgaaaagtggtactacgtgccctacaagcccggtgcgcttgtcattaacatcggcgataccctggagattgtctccggtggccatttcaaggctactcgtcaccgtgtttacaagcctcctgtcgatcaattgcaacaggagcgtctctccctggtgctcttcaacagttccgttggtgatttgcgcatgggtcctgccacaggttagtagattcgcacattggttaaacacaaggactacgctaacgtcatattttatagcttcgcctcttatccaaagagtgggctgtgttgaggaacagggtgtctacaaggagttcaagagcctcacatcccaaggaaagcttgtgcctaccaaccgtcaatggcgcgagatccagatcgctaccgctactgatcctacggatcaagagcgcaaccgagttggtgctgaccaggttcttattgatggcaagattatgcaccaacgggagtacatgggtgtcaaggttgtcctgcctgtctaaaccaaaatgcagccaatgagtggaagtgtttgttgttttgatattattacccctgttttcctggatgatttatgccgacagattgtatgcaagattcatatttatatatagcgttggaatttgagagttgttataattatacatttccaatgtgtaaaatttgtagctcactgcccaagtgtacatacagccacggtgaattagggacgctaaatatccttaacctatcatcaaataataataattcttagctaatgttcttagaatggaagttcagaaattgaaaacggaatactgttacagcttctttccaaatatccccatattatcattaaatagagactagagtccctaaagcactaatcccaatgaggccttaatagagagcgtagcagtgtagaggtgatataagttgtgtctttggctatgactcaatttctacaactctccttggctgaggcaggacaattgtatatcatctcacattgtggtttgctcctgtcttcgaaagtagtattattgagatcttcgactgccacacaaggactgtgtaaaacttttatttttattcttgatatcgtgaaaagagcgagaccgctgttaagttcagaaatatgtgaataaaatttggctctgattctaaaagctattttaaccctccagctaggagaagactctggcccgtcatgtacccagtcttcgctagcatagtaacaacattcgccgtttcttctggagttcctagtcgcttaagaggaatactctctaccacttcagggtacgctgccgcagaggaaagcatgcctgtaccaccgatcatagctggggcgacgtcgttgacactaatgttgtactctgccagtctggttgaaagattcttcatcataccggtaagaccacccttggaggctgcgtagtctagattggaaaactgaatcagcaattgccttcaaggaacaaaaggccagtggaccaagggcagtggattgacttacgacagccgttaattcctccaccctgagcggcgatggaggacatgaagatgatccgcccccacttctgggccttcatgtgctctaccacgcctttgacaagaatgaaggcagcgcggaggttgatattcatagtgaaatcaaactcctcaagtgagatatctgacacgtcgggaattcgcttgccatatccggcgttcgatataagaatgtctggacgctggccgtgctcaagatcaatttgttgaaacatagcctcgatttgatcgccagacccaacatcaacctggtggattgaaatgcgaaggtcctgcgtggcattcttggagcgtatatctgcgacaatattgttcatggatgtcaaatttgtcgagtaggtcaaggcgagatgaactccatgttgtgcaagttggtgtgcgcaagctgcaccgattctagagtcggccgcaaattagcttcatgaccttgtataagctgtggatgttccgcttaccctccagatgcgccggtgattacggccaatttacctcgaatgtcgttgaatgccattgcgaatataggaagtgcaagtatactgatccagctaagagattaagatgacacagaacaagatattgaacattgtgggacctcaatattaccccggcattggagattccccgttatcgaaagctattcctgacagtagactgcaggtcaagattgccatgatacggagtatcttccgtgaataagaaaagtggatagagtgggttcgtcaatgaagggagctcctcccaagttgccaacgtcagcagccctaaagatagatagtgacaaggctattcaaagcaaacctcattatctatctatcgttaatattgagttctgttaatctcgagttatgtgttcattctccaaactttgttttcggcgaagatagtcagttgcgctcatggaaggtggttgtagcaaggggaatcgattcctgaggttttatcgtggcctgaggcattagaggtcacacttcaaggcacgtgatgatatctgtaaacgtcactatcaattaagagcaatggcctgtgaaaggcgtggattcctcaaattccgaatcggtcatttttagcgcatccccgcgtactccatattattgaggcattagtggcgcccccgtgttccacatggccgatccccgctatggctcctacagggatctggccaaggactatgagacccgacttgataccctaatagaacaagggatctttaagccagtttttctatatcatgttgtcattctcaacattatacctttgataggtctggtcattcctcgcagcaagggcggacaatatgttcgaaagggccttttcgtcctctgtattgcaattgcaatcgaaattttccaaaatcgacgggcaatcatcggaggaaatggctacatgcttggtttgatgaccgcgtggtggttagtatggaatgccacgttgtttgtgtttacagaccttgaacatgatttcaagcgcattgaacggaaacccgtcgatatcaagtcaaatgacgccaagacgctctgctcgaacaatccaacatgtacacaacaggacagcaacctttttatttggcggtcatatcccaaaaagttctggcatcgtctggaatggtccgctggactgctcttcaacctgagggggccagagtggaactggcggacttcccatctgggtcctcttccacgaccaattcacgaccaattgcatccaggattcgtgggtaaaataaaggcacatgaaccctccacatatcccaacggcaaacaccgcttgcaggctgcctttcgaaagttcctcatatcttaccttgtgctggacatcttgaaagtcatagtcctgatgcctgatccatactttcaaggcctcgctccggctgattcactatcaccatttcctttcttctacttcacaaattttacattgcatcctgccatatcccagatctgtcgtcgtctatacagcgccataagtgtatatactgcactcgagttcgtgacatcgctcaatccaatcttcttcctggggctatctcttgcattccccaacggggctaggaagctgaccgccgcaccgttgggtgattcttggctatattccgatgcattcggcccattcttcgtcccggtccttgatgacggattggcgggctgctggggtcgttggtggcatcaaatcttccgatacggatttgtagcttcagcacgctggatcttatccgtgcttccggtcggcttggcttcccatccccaagtccgtcgtgtcacttacgtaatggtggctttctgtcttagcggctttgtgcatgcctgtggaagccgtacccagattgcagatacatctcccgtgtccgggccattcctatttttcgctttgcagggtgttgcaatcatggcggagcaggttttcaagacatcggtcttcccgaaatcaccttttgcccgtgcgccgagatggctgagacgaacggctaactttgtgtttgtattttgttggttaatggcctcaggtgggctcatcgcggatgactttgcgaggggcggcttatggctgatggagcctcttccaattagtccacttcgtggactgggatttgggctacaggggcaaggttggtggtgctgggatgagccctggttccggtactggagtgatggtacatattggggaagcggaatacgtgcgttatagaattgatagatctagaatttgaggttacttgagatccttgaagtcactgcatgtccacgaaataaattacatgatcgacagtttatgagacatataattatgatatctacccgtccattgtaacatcgtcatcctcttcgtcggtgtcagattcaatattcaaagtgggcaattcatcatcgctatcatcaactgcctcctctgtggcctgcgagatcagggtcgtagatgtggtggacacctgcgttgaaagcttcggggcctcagtcttgctgattgcaggagctggctgagagaaaggctgtgggttcgaggtgtttgggataattccgtcgaatcgcgccttcttggactgaacatcctgcgtctgtggtgttgactcctcagctgtgggttcttcggtataggtccgcttgtggaaagtaggcaccggagttgcagccttcgaatcgtccggcttcggtacttgcaagggcaccgacacaggttgcttcagaaattcggtagtctttggggcggcgttgtatgaatcatcagccatgtcctcatcttctgcttcttcgtcttcatcgacataggcgtcaagctcaggcgcagtcatcaggacaggcatcctgggacgaaccagagcctccacctccatctgatcagcataaggcctggtcaagaatggaatgatactcgagcctgccccacggcccttgactgccgggacagggttgagtacgctagcaaacatcgcatccttgtcggatgtcaaaataacggagcggtccatttcaacccggatggagggcggaacaagctcggcggggatagaaaggagcacggcctgcaaaagcccagatgcattctgctgaatttccaaaaacggagaggccgcttgtggctggcggaatttctgaatatcagggttcaaaaaggtatccgcattggctgtcccttgtccgccctttgactttgctttagagtcagagcccagatttcctgtagagctggaatcttcagtcgacgacagtatatcattgcagcatgagcgtaagacgtttgtcaaagacaccacgctctgtttcgtcatggcaggtccgttgaccggcaccatagagcgaagcaaagcatagactgctgaacgtaggtctctattgaacttttcgcctttaaaagtccacacagcttgctctagtatagtttgcgtgacggaggttgcgctggtcgccaatataccgacaacgttggaaagcaaacccatgcatgcaatgtgaatgcgaggcagctccatccaaagtgcctctcgctcgtcacggccaatttcctggttgaactgaatgccagaagatgcggcaccattgggtggaacagtaacagaagtgagtcgggaggttaaatcgagaatagagcccatcggaagggcaactgcagctgcagatggcattgagatgaaatcagagagaatctgcagaagtgcaatcaatctatccacgcccgagtgcagtccgctccagcctggaagtccaagaccatctgggcccccgtcacccatttcttggctatagtttggccgtgtgtgcactagagtcgcatcgacagactcccactgctctacgacggctcggaaaacgtggtctgtcgttcggtggatagacaaaatagtcgacttgcaatcgtctttccatccagatcccgcctggtccttgggtgcgcacttgtggagagagacgagcagctgctcagctgcgtcgatcacatgctccggaaaatacgcaggcgaagaagagccaattacttcggcgagaagagttcggagctgggcattaaagggacggaagatggtgatatgtctcgggatcaattccagcaaggcgtgcaggacaatttccatgaatggggtgttgggcctcggctgtcggattgagcccgaaggagtcttcgtgatggtagagaccaagttcaaggcagcggtaacgaatcccggaagttgtggggttgtgatctcacgaacaagtgttgggtactgataagtgaggtggaaaatacgagttagtgtgataatacacatctttctcgtagatatcggatcaggtttctagaaacgcattagtatagctaacataaataatggggtccaatttaattcatactgcgaggatgctgatcaagctgcgaacaataggctcatagccacgcaggatttcccattggccagcttcgactgtagcctttaccagaacaacggcggtccatcttccctcaacactgcggtcctgtaacagactcgctagtctagtcttcagtttatgaatttgaatagcattttcagagtccgatttgccagatttttgagtttgaggggtagagagcagctcagcgcaatcgttcaatgaagtcgccaggaacgaagctatcgagggtaattgctcgaccggagtagttgtcaggcgatgcgtgatggcgcgcaaagtagtagaagacatggcaactggaacagacctgtatcacaggacttgacttcaaaattagtccaattgatggaaaaatgagtgccgacgaaagatggaagtcttatcgataacttttttttccatcgaaaagctcggaccaccacgattaaattactgtcacgtacgtaatcgctccccacccctggacaatcatcaggcttcagtgaacgttgacgaccttgggacgttggcgaagcttgattgctattctccctttttgcatcattcacaactctcctaatcatggctgtaagtgttattcttgcgtctcattcaacgttttctggtttatatttcttctaaatcattgatacactcagtatttatgttgacatgcgcgaatcagggaggtaatgccgagaagggtcagggctacatcgcggccttggaccaggcgcggagccacggaaaatgggatgagctccccgaattgattcgaaaggtcacaaagcacgcatcgcagaggacttgtacgccaccggcccttggtttttttatctcagcctaaccgggctgtctctaggcctgatacagaccgcaacggcagaatcgcgtgtgattgcgtatcttcaacaaaagtcctccggcgactcatcctcttcctcaccgaatctggtcgagctgatccccgctctattgatgacaattgagaataatgacgggtccccacaagaattattgcaagcgcaggtgtgtctagggtggatacactgggtattggatgagcctgcacttgcggcagcgcgtctccctaaggatttcgcgggaatactcgatagcttggctggtggaggcgagcaacccacgtcgtggacggaggtctgtttagtgaagggatgctgcatcaagggtatgtttacttttacttccggatgtagccagttattaatctgacagcaaaccagcaaccgcacaatctgttgctggagacattcatgagtcattggagacatctgtctctctggttccatggctaagcggcggcaaattgacctcaatcaccaccccgcaattcctgaactggtccgagtcacttctgggtaatggtgctcttttggctagtgatgaagtgactaaacatgcgccctattcggatcataggcatgcagatattgccttgcaattgctcaggtcatgggcggctcatcctgtcgtgaaacagggagtctctgctaacagcccatcgaatgtggatgacttcgcctcggctcctcgggcatcggtatggactgcttattataggttcctcacagcagtcctacagggtgggcttacatataccggccccaatgatgggccggaccgcccgcaactttgcaatgaattgcgtcgcgtagagactatctacgaacgcaatcttctctctgaggtcacatttcctacggccagcacccaaaactcgcaagtcgaggaatgggtggagcaggtaattagtaactggcaagtcttgtgtggtcccgagtggcaggattcggatgtcggcgaaggaggccagaatgcagttggtcgtaatgtgttagaggtgagtctaacaacagatctcatcaaaccatatgtactaaacacgtgttgtcctagattctgtaccgggcagcaacaaggacctaccactctcatttggtactccgacgtctctttcatgttcattctgctttggcagactttgacttcgctgtgaaggcgctcgaatcctatattgagattgtcactgcagccaaagaaagagcagagaagtctgctgagtccggccagctggaagatgatgaagtattgctacagacgctctctgaaggtgtcacattattgagctgccttggctcgctggaagaggcagagaaggcccgagatctgactgaacttataagagagtatatcgacaagcacaacacgcctcccacaaacggtcttgtcaatggcaattctaccaacttgccaaatatccccccctccgtgttggcctcctcctaccgagccattggtgttggacttgcctgctgggcaagctggactcctgtgaatgaatcacgcgatgaaattagagctgatgcgatcgaatacctggaaaagagtcttgctccagagttgggatgtagctccaattattcctcgctttacaccctaggccttgtcttggccgagagcagagacttggacactgcaattgactatgtcaagtcagctctgacaccaagcagctcatctactgccgtatctgatgatctttccaaagaacgtgacttggtatcgttgtggcatctgcttgccctgctgctgagtgcaaaacaagagttcgagattgctgggcgttcatgtgaggctgcattcgagcagtttcccaaagagttgttctcgaagggtcgcgaacggcgttcatcaaagaaccccaaccagcgccccattgtcagcagattgcaaggtagagaaaaagaacgcatcgtccaaactcgcattacccagcttgcatttatcgagctcctggaaggacctgaagctgctgtcaaccacagcacacaattattgagtctttttggcactctttttaaggatctggacctcgaggctggggagaacaaatccaaggcagaccacttagtaccaccaaagagctctgccggaactatcaggagcttccgtggaagcattttcggccgaaatagaacgagccagttgccagatcgccgtgctgatcagagtagtggttctgattccgccattccgcccaccccagctattcccaacggtcatatgacggatgccccgtcaatccaagtcacggacgaagatcctcacagtcgtcagccaacggtcgggagggcagactctaagaaactgaaaaagcgaactttaagctttcataaaaacgagagaccgcgcgttgaagagcctccacttcctattgagggtgaaacatctgcagacatggtcggcattgcattttctggcaacacatcaacagagtccgcgatccgtcctaacaaaggcaaacagccattgccggcgatggcacacaatatgaactataaacaagagcctctccctatcggccatgaggaacaaccccctaagcaggatgtccggctcccaatcggctaccgtttcgattctcccacaagcgccgttatgaagtatcctctagttcaatcccagaagcacgccttaggtcttctcgtcaaaatctggcttgttatcgcgggtctttatcgccgagcttccctgttcgaagatgcccgcgagtcgtgtcaagaagcttcgaaacaagccgcgcgagtggaagcactcgttgcatcagaagaatcctccgctcgatcttttagcaagcgcggctggggtgcctccaagagctctgaggagctttgggctgatgtttacgcggagcaaggtcttttgtcccaagctcgatcgaggccccatgaagccattaggcactttgaggaagcgctgctgcgctaccaagaccacccaacggcgactattggacttgccaatcttctcttggacatttgggaccagaaattaaccccagagccagcgaatgccgacgtggatcttaacgtcgcacgtctgtcattgctggcggagacccccagccccaagtctgcgcaggccatctcgaccgacgatctcaaggtatcaagcgagaccgataatgcgggtcacgaagaagtttctttatccgcacaagatgtcgagcctaagcaactgcaccgtctcgcggcccgcgatcgcgcctatgggcttctttctgcgttgacaaagctcggaagctcctgggacaactctgaggcatggtatgcgttgtcgagagtgtacgaggctggtgagcaggtcgaaaagctgaaagaagttctttggtggtgcattgaactggaggatcgaaggccaattcggcactggtccaatatcggctccggtgtctatgtcctataataaaggtaacaaaatcctgtatcttcctgtatctacttcattttggatatcctagacccttgttacatgtcacgtatagtcctactaattgtaaagggtaaaaacctggcacgtaccgcaatagccagatcaattgggcaggacgttataaagcaacgttctaccaaaaagagcaccatgtcaacccttatgttgacatgccaggttaccaattcataaccccactatttgagatgcctagtcactgtcgaagtcacattccaagtaaggttatgagggtgactagaattgcgcctggcaatatgaaccataataatgaagtcaaaggtagcatacttggtcgccgttactattggcaaaaaaacgtctttatatacatctccgcaaacgacaatgagttgtcaatgggttaaaagggaaaacaagatcagttgaacggcaagaaaagtggattgattctgctattgcaagtaaatctaccgcggagcagcaacgggagtccaggcggcgatcttgggccgggtgctagagtgacgttagtcgatacacgggaacgacagcaatatcgcacataggaaaattacacgtacgtggaataagtcttgaatgcagcgcggctctgggtcgggttggggcggggctcagcgagctcccatggacggagaccggactgcatgatcttgtcggcgtgcgggggcgcgtcaacgagataggagatccaggcgtgccttaataaggtcagttccacatcatcgcaggtacatcattgacccagtgtctcgagagaagcgcttaccagccaggctggatctgggatgcgtcgaattcggcgtccttgtagtcgatccaccgtgttcggactaagcggagaagtaccattagaacttcatgtttgaatgtgatagtatgaactgaagagtcttcttacgaggcaattcctccaggttctcgaagtatttgtttccgtagcggtcgactccgatcagagttccggccttggtatcacctgtagaacgtgtaatgttagtcaactgctgggcagatatcgatagggtggaaacgtaccaatgttctataccacagcgaacaagggcataggttagtctcgagctcattcaattgatctgctgttccgggggaggcgttcgtaacctacctgcatctggtgggcggcatcctgtacaagtgtgttaggaaacgagtttctatagggtatagatcgcaattatacgaaccttgaagccgactcggcggagattgcgcagcgtcctcacaatagtcgacatctttgctggtgtattgtgctagagcgaatgggatgcgagagattggcgatttgaggttgcaggagggcggtgtgtttgcactgtttgcaccctgctctaccatggatatcccgattcagaaaaccctcgatcttgaatattcagacatgttcggtcgcattaaagggcagacgctttgttgtgctgggcgtcgcccagccgcacgtcggagactgtgtgctcgccaattttctgcgcatgctggtacaggagctccgactgcagcatctgctccttcacctctagcaggaatcaccgcggagctagaccgtattgctccccgattcgaggtgcctgcgtctcagattcatattattgactccccggcccatttctactctacattgaaggtatcttctgttctgtttgtctcctcgatataatttggaactaactggctgttctgcagaataaaattcgcaatgcccggcggcgcatttacctctcgaccttgtacatcggcaagacagaacacgatcttattgacaccttgagccaggctctccgcggtaatccagatctcaaagtttctattctcaccgacgctctgcgcggcacgcgggagacaccgaatccttcatgcgcttcactcctttgttcgctggttgaagagttcggacctgaacgagtcgagattcggatgttccatactcccaatttgacgggtctgagaaaaaaatggatccctcgccgcatcaacgaaggctggggcttgcagcacatgaagctatacgggatagacgacgagatcattctatcggggtatgttatctgcgaactggtacaaacatggagtactaatatatttgcagagcaaacctatccgacgaatacttcacccaccgcctagaccgataccatgtgttcgactccaaggtgctgactgaatattacgctcgcatccaccatgcaatctgcagtctgagcttccaggtgctgccggaccctcaagacaaatccggctatattttggactggcctgccacaaacaaacccccttctccgcttgatgatcctcagcagtttatcgcatattcttcgaccttcttaagcccgctcattcaggctcctgccaacaaacctgcgcttccctcctcgtcaagtcaaacatatgtataccctgtatcgcagtttacttctctcctgcaacccgatgacacatctaccgaataccctgccgtgacgaccattctccatcttctgtcaagctcatcagtctatgccggggcccgctggctcttcacagcaggctacttcaacatgcaccccgtcctttcctccctcctaatttccagtactaccaccgcctcgaagactcctaccaccacgaaaggtaccgttttgacggcctcaccgtgggcaaatggattctttggctcctctggaatctcgggaatgttaccagccgcatacacacatctctccgcccgcttccttgatcgcgtcgccgaggcaggtgcgaccgactccattcaactgaaggagtggcgcaagggcactgttggcacgccaggcggatggacctaccatgccaaaggtctgtggattacactgccgcgtgaggaacaccccagcctcaccttcgtcggtagcagcaactacaccaagcgcagctacagcctagaccttgagtctggtgcggtggtcgtgacgaacgatccgggtcttatgcagaaactgggtgaagagactgaacggctccagaaagatgcctcccctgtctcgagagatgacttgatgcgaacggaaaggcgagtcggatggaatgtgagactttccatgtggattgtagagaaggttggcggtgccttctaattctcttcttggtcttttgtataaatatctcttgagaataatagcgagtctgtaatatactgatggttgaggctatcagaccatctgagtcacccactatggatccaccatttctattcgattacaccaaaatcacgcagaaggacccagaatgaccactctgaaataccccatgtctatccaaggaattatcctctcaaaattctggttcggcttcgatctagatgacacgctccacgaattccgacgggcctctgccaatgcctcggtccgcgtcttcgaaacgattcacgcctcaaacaacaagaccagcgttgatactctcaagaatacataccaagatatcctgcgcaatacaaccgcaaacgccttcacagatgggaggacttcaagcgagtatcggcgcgaacggttcgggcgtcttctccagacgcacgggctcactgatgactctttcctgagtcgtctgttagaggtatatcgagactctctacgcgaaaacttgactctcaagccgggtggattgcatcttttgcaaactttgcgagaactgggaaagaaaatcattgtcattactgagggtccggcggatgcgcaggagtggacagtccaggaactcgggatacggccttacattgatgtgcttgtgacgacgaacgaggtcgggaagtctaagattgatgggctgtttggtgccgtgctggagaaatatggtatcgccgctgaagatattgtatacttcggtgataatgcgattcgcgatgttcaggctgcgcggcaggaagggatcctggctgttctttatgatgaaaagcagcagtctcgtttctacgatatcagtgcattacgagtggattcgtgggctattgtagaaaaagtactcgtccatggagacatatagagcatcgagacataaacataacttttgctctagccatcaagagatatcaaccctaacgcacaggaatgccgtaataaaataaataataaaaaccaaacgccatgtcatgactgggagctcccgtcgtctcatatgcagtgtaaatcttcatctaagcttttcccgaaaccttgcctttcacgccttggagtcgagctgggccgagaccggatcgcacttcgtcgagcattctgataccaatggcctcgttaccgttcctgccacgcttgtgcttggcgccgtgtcgcttcgcctgtccactggtattggggtcccagctggagaggaagtcgtccatgacgttgttgaaggtgctgctgctgtgcacggcttcgccgttaccatcgatcagactaggggctatggatgatgtggtggacatgcccgtcatgcccgtcatgccggttgcacctgtcatcccgctgatcatggacatgctgtcatcaaattcgtcctcctcgtcgagagcgtagagctgctcaaccttgtcaaatcggtcgtcaaggagacggtggccggcagtacgagccagagcggacgaagtcatggagtacgcagacgggttggtcagagcacccttgcgcttcttccggcgaattggcgttccgccaacagtgaaggtggtcgacgccatcgtctgcgatgctgcgattgtaggtgcagctggtgtgggagcattgccagccttggcatcttttttgaacttggcgaactcgctcatccaactctggtcagtgggctgcatatcgggagccggcttatcaggctcgggcatctcgcctgcatccattggtggctttacagattcttctggcagttcatcttccattgagcgatgagcctcggtgctgtccggttgcacgggcgctttctccgtagcatccgactcccatccctcatcatcgacttcgtcgtcgaacagggaatcctcccagtcgccctcatccatttcctccgcattagctgttaattctccaaagattccgtcagcgtcgccatcctcgacgaaggcttcgtcctccagagcctccagcgcctctcgcagccgcgggtccatgtcaggcttgaatccagcaattgcatctgggacgttctgctgatcctggtaggttggcttgcggataaaggatgaagtggtcgagcgcatatcgccatattgtgagccataaagactgggaccaacggaggcgcccgaaccataggtatctttatccacgagcgagacctgccgcagcgcatcttccagcttcatccctcggccagccctacccttagccttctcattcttggcttcgacaaagtatgcatctccgctgccgcttcccagctcgcggagatgctgcatgtaatcgtagctggagtcatcgtaatagacgccgtagttggcagcctcgccctcatttttgcgggcactatcgccgtattcggactggaggtcagacaaatttggcaatgtcttcttcgaggtgttcgatgagggcgcaggcgcggggcctccgacctggtacaggaaacggtcctccgcactggtatcgtggatcaacgggtcattttgagaccggtgaaagagctggaacttgctcgcgttcttcttgtcactaggggcatgtcagctttgacgccataatcatccttatgcgatacgtacatccactgtttgggcggcatctttgctttggtcaaatttttgatatcgcagaaaaaagggaaaaagtgggattgatagggtcacgtgtagcttatcgcccctcgttctccggggtcctcagaatctgaactgtcggagtagttagtagtatacgatgtttaggggggggggtggttcttttccagttccactctattcgtttaattttgatttgactcattgtgcaacttcgcttggaggcttgggtattcattgggctcggcgcttcaaggcccgcatcaatagtatacatattgaaccagaagccctagttatagactatattggtcctcagatatggcttcaactattttctgctcctatatttaccatatacaactaaaataaccataaaaacctgcaaaaagtacaaaacatggccatatacttccttacctggatggccatcccgccatagaggggcttagtcagcgttatcttatccgtctgaataatccaaaattcccttttcaggtgggggttgtgtctcgacttaattttttacttcctacaacttttctcgattttagggaatcgaaagccatcgccatcatggttttacctaaatctaagaaatccgtgggactgggttccagtctcatgaacgatcggttcggaaagggcaaagcatcggctcaaaagaaggtctctcacaacaatgccatccagcgcacaggtgtcaatggtgaaacctacgtcaccaacgaggcgaaggaggcatcgtgggtcaagatgcgcagtatcactgagcaggcagcgctcgacgaattcctgagtaccgccgaactagctggaaccgactttaccgctgaaaaaatcaacaacgtcaagatcatccactccgatcagaagaaccccttccttctcacccccacagaagagaggaaagctttcctgaagcaccagaaaaataaagaccgcctgactgttccccgacgacccaagtgggaccagtccacgactcgaaatgaactagaaacgatggagaaacaaagtctgttggactggagacgaggactggctgagctgattgagaaccatgatctgctgatgactccattcgagcgcaatttggaggtctggcgccagttgtggcgagttattgagcggtccgatcttattgtgcagattgtcgatgcgcgaaacccgttgcagttccgttcggaggatctggagagttatgtcaaggaaatcgatccccgaaagcagaatttgctgttggttaacaaggcggatatgttgagtctgaagcaaagagaagcttgggctgcgtactttgagaagcacaagattaacttccgtttcttctctgctcatctcgctaaagagaagaacgaggccctcgctttgcaagagaaagaacttgattccgatgatgaactcgcccagtcggcgcaacatatcgacatacactccaatgaagatgatggataccagaaggaggatacagtggaggaagaaagggctaagcttgccgaccctgagcgctcgcttgggccacacattctggacactgacgaactggaagagcttttcctggccaactccccagaatcactaccacaagatgacgagtctagcgagcccaagcgtaagactacaatcggtctggtcggttaccctaatgtgggtaaatccagtaccatcaacgcccttctcggtgcgaagaaggtttctgtctctgccacacccggtaagaccaagcatttccagactctctacctttcgccggagattatgctgtgcgattgtcccggtctcgtgttccccaacttcgccaccactaaggccgagttggtcgttaatggtgtgctgcccatcgaccagcagcgcgagttcaccggtcccgccggtattgtcgccaagcgtatccccaagcatttcattgagcaggtttacggtgtgaagctcagaatgcgtcccatcgaagaaggcggcactggcgtccccactgccagcgagattctgcgtgcctatgctcgcgcccgcggtttctccacccagggtattggtcagcccgacgagtcccgcgctgcacgatacgtcctcaaggactatgtcaacggcaagcttctctgggtcaaccctccaccagttggcgaggacgaaactccaattgacagcgtcgacttcaacagcgacctatatgacgtcgcccatcttcctgagagacgccgagctcagctcacacaagccaagattggaaagcataccgcagtagaagaggtcaccgcggagcccaccggcgacgtcgactcggaaatccccattgaagtagccaagatttccgtcgagccagagctcggtcgcacctcccgcaaccttgatacaggctttttcggctcagaaaccggcccctctgccggccgtctgacgctccccttccaggcccggtacacccaacagggccaggagatgcgcaaggtgccaacaggccgcaaagagcgcatgatggttgctcttgagcgtggcgtggatgtctccgaagtgaaaggcaacaccggcacgaagaagcacttcaaggcaaacaagcgcctggccaagggcaagcgcaacaaccctgcggatgacgactactaaaaagtgattttcttttatatttcctttgcattgttgcttgcgctcgcaggcgagtcgagggagatcggagctctccctctgctctacgaggtatcattcttgggcttattggggcttgaggtggatgaattgataaatggtcccacatatgggatttgcatgtcatgtcgggattgacggtttatgtccatgtacatgttcatgtttgttgaggaatcatctttttggcgttcggttttacgagttgaataacgatttataccagtcattcattcacttgatcattgtcactttccttccatctaagactatcaagtccaacgtaaaaccaagtaaaaccggagcaatgttcgtgcattcttattccaaccgaactagccctacatgtaaactatatctccccattaactcaaagatggctcttaggcttgaacccagaagcaacaagcaagcgatccgcctccgcccgctgccaattcaacttggcaataaccgcatccttgcgagtcttgttctcccgcttacccagctgctgcaagtggacctcatccggaccatccgcaatgcgcagcgtacgaatcatagcccacatatacgcaagcggggtatcctggcaaataccagctgcaccataagcctgcaccgcgcgatcgatgatagtaagcgcagtctgaggaacaagcaccttggcctgagcaatctccttgagcgcgcccttggcattaccctgatcgatcttgatagcagcgttcaagaccacgaagcgggcggcatcgacctcaatgcgcgacttggcaatccactcgaggatcacgccgtgcgcgactagaggcttgccgaaggtcatcttgcgctcgtcgttgacgcgggcaatcagccactcgagcgcgcgctcggcggcgccaatcgaccgcatcgcgtggtggatgcggccgggtcccaggcggccctggatgatctcgaagccgcggccttcgccgaggaccatgtttgaggctggcacgcgcacgtctttgaatgagatgtggccgtggccgtggggtgcgtcgtcgtacccgtatactgtcaacatgcggtgcactgtgatgccggggagtccggcggggacgaggatgacggactgctgcttgtaggtgtctgggttggaggcgtcggtcttgcccattacgaggtagattgcgcagcggggatcgccggcgccggaggaccaccatttctgtattggctgttagatgttgaggatgagaaggggattgtagaggtacacaccgagccattaaggacgtactcgttgccctcacggcgaatgtcaagctcgatatttgtcgcatcgctagaggcaacttccggctcggtcattaggaaagcagagcggatcttgccctctaacagaggctcaagccactgcttcttttgtgcgtcgttaccatacttggcgaacacctccatgttgccggtatctggggcagcattgttggtagcctgataagaagcaatagtcagcgatcaatcgtatcaatttgcaagacctgcccagcaagtaaagcaatgcgccagacaaaatagaataactcacctccgaggcaattttgcttttgccgagcaactcggccatcaatccatactccaagtttgagaatccagcgccctggctgaagtggttcttaggcaggaacatgttccacagcccgatcttcttggccttctccttcagggactccaagatggcggggttggtcttccatcgctgctccccctcgccaagctgggctgagaagacgatatcggcagggatgcaatctttttcgacgaattcttcgacctggagtcatgttagcgctgaatattggtgatttgcggatattggaaataaattaccagatcgagggtccgcttggcctgttcgctgacgaacggctgggcaatgggcggaatacgagaagaagcggacattttggatataagaatgattgaattgatgcagaatataagcagaatcaacggatccggggaatataagggaaatataaagagaacgaggtcagcccatccaaaattgcggagaaggtggagaagccgagtccaagtgcctcggctcagctcctaaccggacgacttggagattcttgatatctcacgacgtcaaggtaaatcggccagatctccgagattacttgtacagaagtctatttggaactatgtatatggatcagaacattagtattcaatcattgttcaatattatgatatggcaagtaggtctagttaacaagttaacaacggagtacagccgagatatcaataagaaaagaacagacaactgccattcaacaggagaaataaaggggaaatcaaagattcaagccagctataagccaaaaagatatctcttagctacccctgcttctgcagttctttcccgaaatggcagtccattcaacatcccgaggtctgtaggaaatcgactaagccctgacactgtattgttagcagcctgaattacacattctacacatatgcatatagccatgtcacaaccaagaaaagattgcgttgattccaatgtgctccatgagatatcccaattacagttccatccatccatcccataccccgtacacacaaaaaaaagagcaaaagcaaaaggcattgcaggtcatcacacaaaagaaaagaaaagaagaagaacatatagaagaacaataaatcctaacccagacctgctcatatccaagatctcgaatctgcctttcctcaatgcatccgacacagcgaccggcgccgagtaaaagcgattgaaggaaaagaccatagaagcagagtctggggggaaagaaaagagaaagaagaaaaggaaaagaagatcgaagtgaaacacctcaaaagacccgcatctagttctcaaggcccttctcggctgaagattgctcgtagctcttcttgccgagcttggcgaacaacgattggggcttgccggcactgcagttgagtaggttagcttggattcgattcagagtctatgtgggaaaaggaaatcacatacttcttgaaccgcttgcccttgatatcgctcaatttctttgtgcaggggctcatgatgtcgtctgagggtgagacgtaggaggttggttgtctgttatggaaggttagttcgttgcagaaaagaataataggatattttatatgggagtactcactcctcgcctgttacttttccctgcaatacctggcggtggtgctccattgatgagatgtctgagcccttcaggtcggtcttgtcgctcgcgttgctcaggtgagtgttggttgagcggtcggccaggggctgagcttgtgtggttgcgtccattttgtgggtgtgtagggatttgaatgggttaaagggaggtgtagataggcagtgatgtgtattgcgtggaggattgcgtagttaaaagggaagaaggttgacaaaaacaactcggataaggtgaaaatcgtgtgttgggtgggcttcgattgttgtccgggcaactgagtatgacgccacaacatattccctcaaccttggataattgttactgttatacaggcttgtatttatggatatctaggttttcattcaaagaatgcagataactctaataacagtcacagtaggaaacaaaatagtaaacacagaaagtgggaatcattggtcgtccaaacatacacgtaatagggtacatagaacagtgtacagatgcagaacgctagtggataaagatcagaatgcaaggtcataaagtatggctaaagccattataccatgaaaggaagtatcacagctcaggtgactgtggagtatcggtaacccgggcgacatcgtccggtgtagtcatgtccaggtcatcaggccgcccattcagtacaggcggtgtactctgagaacggggttgtggtgtccccagagtaggcacagacatagacttgggagagacgggttcttccaccctgtctgtctccccgacatctcgttctggagaagaagaagacgtaggagtcggcggggaataagcagcggtcggactagtagcgctatcttgggacgagtcggagaggtttctgcgatggccaccgttctcacggtatgaggacgaagtcgggcgtgtcgaccccgggctagccgatggtgtggcgaaaattggagatgaagaccgcagactgtaggaccgagcgaccattctttgaacggcagggaattccatatagttgcttcccgacccccgtgagaacagggcgagggcaaagcagcagaggaccatgatgctctggatcacggtgactctcttttggaaaacgagctcgtctgcaagaacaccgagctggccgctgagggagtggacttcttggtggtactgaatgcgctggtgctcgaattcaagagcaacagacttccagacgtggtcgtactgctcgcggaattctctcaattcgttgagaacagtgacgttgagactttcaaggaaggtagatgtcttcgctagctgccgcttctcaaccttgttgaacgcatcgcgcaagatgcgagattgttcctcgatatagagaagagacagggttgagttcgactcgagcatctggagccgcttgtggacggacttgaagaaggattcttgggtcgtgggatttgcagatggcggttgagtgttggtaggtcttgtcgattctggaagagggctgttctgctcctcttttgggttggtagtaggtttccctgcggtctcggatgtggcgttctgctgagcaggctcgaaagatacgcttgaggcatccggagcggccacgacacttttggcaggctcgccctgttttcggatatcctcagcttttgaaggggcgggtggtgcgacattggtcgcggagggactacctccaactgcagcagtagagttctgtttcggtggtggattggtctgatccgttgtggctgacgacgatggagtcggaaaaagcggtccatcatcaatgctgcatgtatctccatcattatgcgtcgcaaaaggcgagacagcctctgatggagggtttggacaaatctcctccactgtaaggctaggttggctaggttccaccgcaggaatagattcctcgactggcatttccacaggcttgatctccaggtcttcgggaacctgaatagcttcactggcctccaactcctcaacctcaacgtgatcagagctctcgccatgcttgtactcttccatcatggtcgtaccatgcacccgaatcaagctgacggggcagaagaactcatgcccatagtgcgtgaggaactcaattctcagatatcgagcccaaataagcgagttctctactgcgaaggcttgcacctcacgagtgttgcgtgcctcatacaccccgagttctttccactggtctggtttcgcgggataccgatcggagacactaacccggaacgtgtggaagatggagctgaagaactcatagtttgcaaggacaaccgtatcaaccagaatatcatcacacatttccagaacaagaaatttgttctgcgcgcgacactcattgagcatatagctatccttattctcaatgagcacagaagaagaacccttgctttcaggattcgtcttcaagaccgtagctgcgcagtcaaaggaagcatagttgaaccgctctttgcaagtagtgcccgcatccttacgacgcgacgcatctctctggagcgcaccctgcccttgcacatccacattgcctctgccatccgcattccccgactgcccagcctcgcgagacgggatatgcgagccccaagcggtaggactagcctcgggcgtctcagcgccgaacccaccaaagtccaactcgatctcggcatcgtcgcccagcgaatccaaagcattattgattccagtcggctgccgacgatcttccttcccagcagccgcagcgcgtctgctccctccaacattctcggctgattgtccgaccttcgctaggttctgcttcttccagtcctcaaaagagaggaaattaccaccgtctaatagcgagtccgtatcttggtcctgttcggcgctctggtcggcgatcgttttcgctctctctcctggcgtcccgctcgggattataggtggattcacgaccggctcgttggctgtcgcatttgtatcgggcgccgaggcaaggtagatatcgcgacccggcccccagcgcgtctccagacacggcggcagatggaagagctcggactcggtctgccaggtactcttcgctggacatgtcgctggtgttgtgtggtgagcagtttgcgccccgttcgggggtggctgggcggtcgcattggagagcgcgctgtggcagagagccaaaatgatcgaggcgcggtatatccaaaaggtcaatgagggtcttgtggtcaacatgctgtcgatttggtgatcagatactcgcatgtataactccctcggtgagttcaagctatgaattcgacctgcttgctatgcgcatcgtggctgggagtaaaggagtcggcacgggaatttctcctaagtggtatttcgctatacgtgggggaggttgcgattaagcaaaccctagcttggcgacaagtggcggtctccagaaagaaatggatcgtctggtataaatggcaggtgatagtggaccggtggcatctcggccacgcgctgggcctgaccgcctttcaactcggtgagagcttcagggctgcaacgttcaggattcaatatacaacttagttagactacaactacaactacagactcatcatctatgaattacagagaatcatattcttcgtggataatgtttgattttccctttggactgttccacgaaactagttacagtataacacaatcaagagaaaacggccacggtattccaccacgtaggcaaatcgacttcaccgcaactcattccacctttccctgaagcaaccacgtcaatcgtgtagttcgtatgaaagcctctcgccagaattaaatatccaccagcgcgttccgagccagccttctaaccttttgtagttgtgtatccgtcgtctccgccagtgtccttgatcctcggtctgatattgtacaggaagaagaaaaaaaaacagtgtggacgaccagggaggatgatacaatgcacgtggcaatgcaccgttggggacggacggaaacagacgaaacacccaatccgagaacaaagagacataagacagaaagcggaagtttattttatcgtgggcatttttgaactttttttcccaactgaatcgaaacatgcaagcagacatcaaaatgaggggagagtatagggtaagggtgagtgaagttcgagtgaatgtcgacaaccctagaagtgagtctcatgccaaccaccgacaagatcgagatcatcgtcaacgcttccatcaagaggaaggaagctgctggggacatggctacgccaatcctgctgttcgagcaaatggcggcggcgaacctcgacaggcgatgcgggcttggacttgccctggtggtatccggaagtacctcgaccccaatcgtgtcgccgagtattggcagcaacactcttggggccaaacacctcacgcgacttgcggggcttacacttgtgcagttcgtcctcgggcttgtactggcgtcggacttcaccgagcatggaccacttatcggcccgagacggctcgtgtggggagctccgcatggggcggggcgtgctactcgacgcactggagtcgctgtcttcgtccaaggaaagatcccccaatacatggggttccatcttcagatccacatctgggccgtgagagcgatggttgggggaagcggaggccggctcgcgcaatcttgggagggcagctccctggctctcttggctccagctgcgagagttctgctcccgtcgttgagccacagcaagatcctcattctcagactcttcttcgtcccacatgtcgcaccaactctttgagatcttgtcggcacctttgttaccaaagaccatcgacaaggaagggagcggcttcgtcgtgtgagacggcagtgatccagtgatggaaaccggatcagagcgaggaagagacgggcccgcacgcttgcggagatcatcacgcttacgaagattgagcaagacaaaggattcactgagctgggagtccaaaacagaagccactgaaggggattccatgcgagacgagaaccacgaggttcctgcagcttcggaagctgggaacagatcctcggtgtagctctcgttgtccggaatggcagagagttgtcggatagcctggggaggggtcgactggagcgccttggcccatgggaaagcatctccctggttgacatatgggctctggagagatggggtgcgaagtggttcgcggttggcgctggcaggaaccacctcgcggtcctcggtgcaaaactcgtcaagagattcgtcgtcggtagtgaacgagaccgcgcggaggatgctatcacgcacatccagcaaagaccgcttggagggatcaatggtcaaggcatgagtcagaatctcgtacgtgtcctgcgacatgttggggaagatatcgaaaagcgactggcgatcccgcacatagtcggcaaagagtacatcggactcagtgggggtaacgaatggattccgagcaaacagaatgttcaacaggcagatacccacggaccagatgtcggccttggcgggggagtatcctgtcgtggtcggctcatattgctcgggggccatgtagcggtcactgccaacacacgcctcgtaacaccacgagtctttcgtagcgagaccgaagtcgcctagcttcatggaaccgtcctgtgtcaggaagatattctccggcttgatgtcacggtgatacaagccattggcatgcatgaagtcgacggcactaattagctgcagcatgaaatcgcggacgtgctcggtctccagtggaccacggttaaggcggatggcctcgtataaatccccattggcacagtactccaaaacaagatatgtatgagtgtcggtgttgaacgtatgaatcaagttgaccaaattcgggtggaacccgaatcgtcggtgacactcgagttcttcgaagccggaattcgttgaggccttgatgagacgtttgatagcaacatcctgaccggtcttggtatctgtagccaggaataccattccaaaagacccatggttgagtggggccacggttcggaaacgaccatccaaaagttggccttcaacgaactcttccttcaagcactccatggtcgacatgttggcctgatgatccaaaaaaggacgaatgcagagatgagatgaaaagggggagcggactgatgtaatgctccaacaaagagatgaagtgaaaacaggtctatgaaccgctcaaagaacacttacgcttgtgaagaatgcgtcgaagtgtgataaacaaaaagcaaccaggctaatgaatattaaaaaacaaggagaagaggtatcaggctcgggatccgaaggtaaatagagggcgagaaaagccgggtgtcaggaggttgagatgaaagggaatcctgacaggagatgtcatataaaaaaaatgtactggtgaagttgatagacagatgaaaagaggagagaatggaggcgcagaggcgtagttgaacccagggggttgttgatgctaaggaaattggtaaagaccgttatgtgctcatttgtatgtcgtttttcgttggttaacgggaaggggtcccaggtggacgacacgaatgtgtcaagaaatggacaagtggttggaaagtcggcctgataccggatgaagcgaagagagtcgagttaaagcgctgcgtaatatcgtaactgaaaaaggtcaaagatgtatagggagaatcctgtgaacaccgggttcaaggtcgaggccgtgactcaagttgaagaagataaataattgagattagtgagtcatgaggccaggtagtaatgttggggcaaattggttgggcgaattgagggatccggtagagtacccttctaatccgagttggaaaagcagagatactctatgccaggttgcccctgaggtatgaaacttcgggagtgctctcggaccaggctcaaccgaagaaacgtatgattgaccacaacgcagcggacaccttcgtgtggattggagtgacgaaggctggaggtatcgatagcaaaattgaatccgacagaccgggatgaggacacttttatcaagttgaagaaagtgagtcacccgagctcagggtggacccggaagacggaggaaaaggggtttaggacgggagaggtcgagagtagtactctgtcaaaggtagatctgaatccggccttcgaggcttgaagctgtataagagtacaatcgtccggggttggcaatgtcttgatatagatggcaagcagacacggcaatcttgggaaccttgggagcgttggaagtaataggaaggtgacggagaagtgatgcgggagagatgattcggacaggtaggaaaggcggaaggagagatggggatctaggagagcgaaaagaagatgatcgggaacgagatgttgatggtataaggggagagagagaaggagccagggagagttgagaggtgttgtaaaggcgtgaggggaattggagaggccatgtgattggctgtacggtgtaatacggtaagataccagtctcccctcgtggacggtccatccgtgcgatctgcgttacccaccgactttggccggcacctgcaggtcctggggccgtttccgtctcccggggaaactggtcacgtattgaaataataccggtattgacaacggggggtccgtctaggctctccaagtttcatgaaccttccaggcattccttatccttggaaagacgtcaaacgtctacgtgatcgacttcattgtcgaatgttggaatcggggtctacgataacgcgataacgtttaaattccattgttggttgcctctatcacatcatccagccctatctttcagatttcagacttccaactctctggccttcagactttcgatcctaaactctcgagactcggggtcggccacaagccagtcacaatgacgggcgacatcagcaggggcagccctttgtcttggagctcttggagtctcgtcggccgagggcggatcaaggtggcgcgctactcccaaagcgtataattgcgcagccaattcttggcagatcagccaatcagaatacatgatccggccactatttacaagctgcatgacgcgatagagtgggatggcgtgatctcctctgattggaccaccccggatacctactgccagctctcttccaaggccggtgcctatgggaaggtacgaaggtacccttccgcaggtactcatgcacggcgggcctggtttcggagtggaccaggacaaagaccagggtttggcttctcgattctcccagttacaccactcgctgcactattaacgttattctttgccgcgcgggatattatgagacaagattcgtctgacccatattattgacccccccgatatggttgcggggttctaccaatacgctatctctaactatatcagcgggtaaccatatcgatgatcaccagagttgagggagtatggagtatgttggatcggacccagttattgatgtgtccgtctccagtagtaaatggggggttggagaacatctcaacccaagaactactccgtacaaagtacaagacacgtatgttgtacttcgtgtggagcgtgctcccaactgtcatgattcccaaccacctttcagacacccacgcagccctgtcaagcggtgaagggaatgctttcgctgccaggtggtctggccttggatcaggtttgaccgcttcctgcggcctgcaaggccaaaccttgcaggtctcgaggtgataggtacgatgtacggaatatacctttggattcaaagcatgctcagaagtaccagtacgtggacgcttgaaacgatagagttgtgtggctatgtggcacgacttcggtttccggcaactcctgtgcatcacgcgacgtcccatccattttgcgtctcatcaccccatttgattcattctcggagatcgcaaccctcccaattgaattcctgggctgtgcatcggatatggacataaccagctcgtttcggtacattatctacgaatgcattgtacctagcatattacatcgctccgatatagttgtacacaagatactactttgaatccattgcagtgagatctgcaggaagtaaagtgcacggctcagtatctggtcctgatctccccctccatcacacatcagccattgccgttgggtccgtgattacattctcgttctctgttatgcagtctctcgccgagtataacatatacgtcaataacgtccgtacacgatctgctgcatcagtacatataaaaccccctctaagcattcgtcatctacggagtgttgcatcaaaggaaatcgatcagcctatgacagtcgaccccaacgataaattatatacaaccgccctatcagcccctagcgatgaattgaaacgtgtctcttacacttaatacttgggcgcctgcatggttttagccacgtacatgactccatattgactaccatgataccgagggggctggagttatcttccgaatgtggtatttttgatatgagatgtgatatgagatacgggttagttacctatcagttcgaaggttctacaagttacggagtagactcccggcgctgggggaagtatcctccgatagggacgataagagtccccagacccgaggcagaagagacaaccttgggcgtaaacaaataaataggatatctacggtttgaatgaatcatcattatcagagacgacggtatcactaccataccccgcacgatcgtcattccatgatcatatccaggcgagttgagaattttgaatccgtctcagtcggtatttgaaggggtcatgatagtcgtgctatgggaggccaatgatgggttggtaaacagtgttggacaacatacagaataggatacatgcatacttcttagccagtgtgtatttgatctaatgatgagatcactcttatcatgagaaatgacatgccaagccaaaagagggggtcagatagccgaatagactgggagccacttccccggattttagtctcagctagttttcctcaatcgggctaacctatattataccaaatatgtagaaccctgtgcatgccgagctattccttgaccttctatatacacgagctgaagccaccagaactttaacattctaaatattcaagtccgagtgcgagctcaatgtgacttgagactaggatatcttaaaggacccggcacagtgcatatggcctgtgcgactacggagtacagagttctacatgtaaatctccagggcatcaacatgcatcaacattcatctgcattgcacgatgtcctttgtacatcgtagggcgatcccagcctcctgtaggtctctttttctccgtgtgcgactgtgcgttgctgcaggaaagaaagcagagattggaattttcaagatcgatgcaagggtccttattccctgaggcttttttttttggggacgcatcatgtgagagaagtttcttgctatctcagtatgttcatgcttgacagtttgagtttcttcgtacgttgccgagtcaacacgggcatgttgtgtcccctccattttcgccttacagatcgagtctgtcgccttctctgcggggggaatgtgtcggcgaattggctactagatgtgcagtatattgcatattggctttctacggctccgttgttgtagttcatccaccctacgttgttccttgtatgctctgttcggatgtcccatgataacattatagctatcaggatgtatattcaatgctaatataccccaaaccctgatatccattaatacagattcggtgtttactattaatacggtggcaacatatagtacaaagtataggaggtccaaaacaaaacaccgtcctcggcctcctgaccccatgccacattccataagggtcctgccaacgtcattccaccctgacatccccctttccgttccaggtggatcattgttacacttgagttaataaatcccaaatacagagtgtaataaaaaagacctcataattgagtgacgttgagagacccattattatttgaaacgaaaaatgagtaatacagtggagaccaggcagcgccagatggacctctgagggccatttattgcttctatttacagattatggagtacttcggatggtattgggactcattgagctccgcttgcatctagactctgtgttcatctggtcatggcgatgcgtgttgaacttcgagtctgtggcgagtggaatcggtgggagcgtactccgtacaatggtcgtgttgggaatcggcaacggattcgcgctctgtctcttggagttgggtctggttgaactgtgaatatgtatcagccggataacggatgtacggagtacgagatacatcctcaggtgttgacatgatgttgacattatgtggatctgattgtacgcttggccacgtaggcggatcacataagttgattgtctgtcttcggaggcgaatttatatttgttatcttatttggttcgtgtagttaaagcaattgtttattctggttgttctagttcctatgtcgaaaccaaaagacgctggttgtttatatttactcggtacctgaggatctatattgtacgatatatctctgataaccacttcatctcttcaacatagaatctactaccaaaacatatctatagatcaaaatcttatacaccctagcacacatacatagtagtttgacttatatcacccattgaagtcgcgacggaggcgatgattcatagcaggatggcctctgattggccgagaacccccagggttccgcgataaaaaaaccgactgactcaatatcaaacccccaggatgtcgcgagaaaggtccattctcgaggatgcaaaatgagcaagcgctcgctcgaggagtccagggcaggtgcacatatgtcgcccgatcccgacaataatggcttgctgcccatccaggacctgctctctcctggcgaggaggagcacggtcaatcctccggaccctccaagaaacccaggaacttcattgcgactgtcgtaagtgcccaatttgcctcgcctattttttccgcgacgcgaccgagtcatccggtgcccgctaatcccaggtaataggcgtgtgagacttgtcgcttgaaaaagaccagatgcgatgaatcgcggccgaggtgtggactatgtaagtcgcttggcctagagtgtgtttataatgagcgtaaatcttcaaagtaagtcgtcctcggtggttttcatttcatgcgcttatacgatgcagacgcgatcaatctctcacgatgatcatgagcactctccatcgcctggagacaaaattggaaaatatcccaacgtctatcttgggtgatctgcagtctcttcggagccaaattcggcctgtccgagagccgcagacgcagctatcgcctgcctttggtggcgacaaccagcccctatcaatgctgtcctctatcggggacaacttcacgcccgcggcaggagatggagatgactttgaattcgaagagaatcaaccaaagtcagactctgcaggccggatttctatttctttcagccagcatggtgtcatcgtctggcctggagcaagacagatcctcccgaagcaattacttgccgcttatgagatgctcgggaaaaactatgtcattgaactggaatcagcacggcctccgctgccgatgtttaccagtccctatccgttacaagcgggagatcactggctagaaatacttccgttggcaatgatcaggggtctggcggatgcgttcttcagtgtttttaacccctccacgccgattatggacaaggggttcttcttttccttcactcttggcacggccatcgagagtggctttggatataatctcgagagttgtctagtgcttaacgtgctagcattgggctgtctcgcggttctcgcctaccaggaaggaaactatcctttgccgggtactcaggcccatcgatttgaacctccagaatggatgaacgtggtgtacgaagaacagcctggactgcggttctttaatgaggctcgacgacgtatcggcttcttgatgtgcgacaacgatatccagagttgtcaattctaccttctttcctcgtacgtatatatgcccaagcttactctatacacagattgatactcatcttctatagtgtatattataaccagattcctcgtccgatggattcctggacaatggtttctcgcgctgctacttgctgtctatcaatgttgataaagtgagtcctgccctaatcaaacatctggtatgatactgacgcatacagccataatgtgaacttcgatgaatgggaaggcgatatgaaatcccgcgtatactggaactgtctaatgaacgagaccatcctcgtacaagagctgcacctcccaccaagcggcctctcccgtctcgaagaacaagtcccaattcccaaattcatcggcttcgaaacaaccggctacgcctcgaaccgtttcaactcatccagcgtagtggacgactcatacttccaatatcatttcctggcccaggtagcccaccgtatcatcctcacgcggatccgccattcactctacttctactgtgagtaatcccgccaatccacccagacacccaggcaccctctaacacccaccctccattagcggattcaggaacattccccctcccagcaataaacaccgagctacaccaccaactagaacaatggcgcaccaacctcccaacagcaatccaattcaacaacgccccctactcatcccacccaaccccagcaacaccctccatccacacctccccacccgcctcagtagcatcgccagcccacctctcctccccaagatcaagacccacagacccgaaccagcccctttcccccgcaatagcagtagcagacgccatgcttaaaggccggtacatgatcgcgcgcttccacatcggccgtccgtatctatacaaagctctccgcatcccgcacctcctaacagacgaagacttcgtgcaagtgcgcagcggtctgcagaatgcaatggactggccggttactcagggtatcttccggaaaatgaagagctgtattccgattaagtttgctttttgctcgcagtgagttttgcttctatgttttcctttgatgcctaagactacgtgtttgggaatctttaactgacttttttcttgaagattctttggtcagatcttgctcttctattgtatagctcattcgccaagtgcccgtctccgtgagacgctaccggatggctgggaacgatggaacgaggagatgctagggtttttggaggactgtgctgtgcatagtccagctgtcacgcaggatctggaactgttgcggtatctatggcctgataattaggtgttttgcgttttgcgttttgcgttttgcgatttatgggatggggtatattttattttgcgagagatggattctgttcatttctatctctacaactacctttatggcaatttgtttatttgcgcatggggctgagtagattattcgcagtggatttgctattgtacgcatctagtaggccatgacgtgcaactggacaactattggaaggcaccactcgatcccaaacaggcaggaagggactggcaagggactgccccaaggcaagagcgttcctgggactctgcctgaggaaggaacgataacaaaagtgggtataaattgaaagttaaggcagatattgtaacctttatttcatctttcacgtgtgtacaagatcaatgtttgaatccgaatcattcagtatagctatgtctatatacaagggctaggcctcatttatcatgtagcacctgcttaagacaaggaagggtattgcgaaaaatcaaaacgaaactagaacaagtgtttctgcagggatattgtctgaacaccacacgaacaagatactagacgacaccccatgccatgatgcatgggggatgcatatcagagagcccaatcctcggccgtttccgattttccgatgaagggtttgtcaatttgtttgatggcatggtcaccgcagaggatactggaaagatggttagtgagatatactaataagttaatagggaaaacacataccaggcttcagcgaccagcccatctaattccttaacaatctcctcgcgccgcgaggaagagatatcaccactgctgagctgcgcctgcagatcccgaatatactttttcttgccaccagcaccgtccaagacttccctacccaggcagtcactgtggaaagaatgctgacaggggaagacgaagaactgacggctgagaactggtagcgagcagatccagcacttctcacctggctcaacgatggcgtagcgagtatcgagaccggaaatctcaccgcggatttggcgggctgtcagggctgagttatccatctcctggcggagcgagtcaatgtggcgcgagtagtcctctaaagcagtacaaatctcatccttgaagtcgtcgatgacgacaaaatcggggaagaacgggatcaggtcctcgatgcggagcagctcgcagcggcgcaggaattcaatcgcctctttgatacctgtgcccggttggcggatcttcttctcagcgacgaggagccatagctttttgcggagcttgtcgttgccctccgggcggtctgcgacgatcgcagcaagttctatgtctttgtgctccagggctagctctacagcttgtagatactgccccattgtgctgtatatgtgaatgcatgattggattcgttgattctgaatgcataaacgaagtgcgaagtctgcatcgtatggagggtggggtgacggttgcgattggagataagtaagcagtccagcctcagacggtgaaggactggaggcatgtattgagataagggtgttgtggactgctgcggatggatttggatgattgacaatgatgaagtttagataccggacggcttggttctggttgagggaggagacgatggctgatttgttgtaattcaacaacgcagggatcagtctctcaggatcaaggttcgtttgtcgcatcaggatatcaaccaggtctgtcggcttgtgtgtcatgagcacgctgctatatttgtagaacacatcgggttcgctttgccgctgcaagaccttcaaggcttccagccatttctcgcgctgaatccagtacgatagaacatagttgtaatcgtttgtagcggttgcgaagaacaacaattcttcctcccgcccgtggctgctgataatatcatatactgttttcttgtccaagtctgctttgtggctgttcacgaactcttggaaatcagttcggatgctgccaagctgatccttgatttctccagtgcttgtgccttctgccaattcggctttggtggcgatattgtcatcgagagaattcaacttcgacatgaacagttccacaagccagctcgcgaccattattctttgcataagcgaggcctttttgtatgttgccagctgagagaggaggtagttccgcaaagcatcatgctctttatgatcaatcatggtaagacaaacctcctcgaaccctttactgctcttgccccatactttggctgcctcgaggaagttacccttagatgccaaaaaatcacccgaagcagtcatgacagcatctcgctgggcagcacctcgtgcatactgaagggcctcatcgaatttctgctctttcaagaaggttctccagacatctctatcctcatcacctgctacaacttcaaaaatggcctggctggtgaagagccaatacgtgtttttggtgaggtcagtcaagaggcccagagcgctttgcccagcttccaacacgggttgatcgtggacaacctcctggctgagacgattgactgcgaccactctgcccccaacaagtgctaggacatgccactgagacagagtcatggcagaaatggggtcttgtatcaatttccgccctcctcgcggtgattcagaagctggaaatagcgagcgcggaagcatccttgccgtcttgaatggaggttccgacgtaagttggccatgatatatcccctcggagctgagccacgcaaactgcttttcggtataaccctcggcttggtaaccctctgaaattgtgggcgaaattaccagcgaggatggcgcagagctagacgcatttggaacctcgtggatcactggcgtctcgcgctggaaaaggtctgaatacacgccgctttcccttccatgctttgagactcctgtccggccaatgaaatgaagtagcttcccataggttgccacaagcactcttctttgatcaggcgtagaggacactgtttccgcggcgattccgatcaccggagaggcacctggcacctggtagacgggggtggtatacttctcctgccggtagctggagggttcaatataagtctcgtagatgttgccatcagtggcaccaatgaggatttcccgagtagatgcagtcggtaaagacggattccaagcaacgctttcgattgacacgccttttaatcgtgccaagggtttcggttgtcgcgacggtgactgggcatggagatagtagttttcgccgagggtcgtggtgataatcaaatgagatgccgaagggtcgaggaacatgcgccgaatcactcctatttccgaggatttcttagggagatcgatgtctattcatgagcacggttaggtcaacatgttgtggctggcatctgctgcggggaaggttcggaagtttaccttcgacatcttcaggggaatcaagatcgattcgtagaatgcgattggtcgatagggccagtacaagcacgttgtttgcgacttgcgctgcaacgaagtccgcagcgacggcgaaggccaactgcactcgttcaacgtcgaacattgggagggaagagctcggtggctccattaagttgctcggagcaacataactgctggatgggtccagcgccatagtgcgctagctgtaggggcactatgtcatgccgctcatagaagagttgaggcaagccgagggttctgcgagtttatgcaggacggaatgggctcttgaggtcagccctgatgccttgacacctgaggccaagcactcggatcaccaaatcagaactatacagttaactagttacgcagatctataacaaggcaaaataagcaaatttgtagacatctatgaattctatcataaattgcaagtactaaagtccctccgctcatgtatcatagggtatcatcgttgctgaaacatgcgacatctagactgtggactgggtatctcaacacaaaaaaaaaaggaaatcctcgcatcaccagcctcacatcactacacattcccgatctattttcctgttcttctccttggatttctccttggtcttccctttattcctctcgcgatccttcgttcggcctctcccacgcttctccttgtgctcatgtccgaatttcgtatcgtccacagtgtcatcaatctccaatgcggactcatcctctccattttcttcagtaaatccgtcgttgctaatcttatcccgactaagccgttcagcaaagcgtgaaaaagtggcactgattctgttttcactcgtttggctgccagcacggcttccggggctacccctggtcgatcgagatccaccctttgtgctctcctttgggcttccttcttccgtcggtgccagcctaggcgatgaggacggaatagagcgcggctgaagaccagctgggttactgatttctgagaatgccatgctaggtcgccttgcgatactggctaatgttggcgcattattctcgcctggccctgtgacctcaacacttggtcggtcagaagaaaagtcttccatgctgaaatctgtttggtcgcctagtgtactgccgtctgacgcccgagacgatggtgggttcggaatgttgggcgcagctgggtctgcgccgatcggaagaatttggtagaacagaagatagggagactcggtcttcaatgcttgatcaatgtcaaccagcgtcactcgttctgcggcgagatcatcgaaccgcatccagtgttttgatgtctccgaggattccgggcctgtggcagaattggggcaactggtgcctcgaacaatggaaatgtaatgtcccgagtcaaccgagttccccctgtggcaaaccagagcctgcaaagatagtttaaagctcccataaatgggagcattcgcatccatgttgtcgtcttggatgaagtgaggcaggccgatctcagttgggatatcaatgtgtgtattgagtctgactgccctcccatttggcaagaaggaatagcgttttaggcacatcccaagaatgggccgttttgtggaaaagtgtgctgcaacttgcgcatcgtttgttggcgtattatcggtataccatgctaagcaagattaggtcagttgatgcaaaacttcaagaacaggacgaaagatgacttacgtatcaaactgaagaattgccacgcaggcatcattacctctttcttgtatgaaccccttcgctgttgcgtatctccagtagtatcttgatctgcattggtaactttctccggattcggatctgtctttgtaggatcactatccggaaagaaccgctctcgaacaatactaccatttcgacccggtacccgagatgccgcgagggattcagtgaactcatcaaacgatgaccagggggttggcttttcgacccgcgacgtagttgattgaacaggagacatagtgggtgtgctctcaacctccactatttcaacatgtgaagtggatcccttggatatggagagtgaatccattgaatctctcgcggtgttgcgtcgttccatgtgtcgtttgacttcaatgatgttattgaaataagcttccagacagtcttctagcgtgagtgaatgtccatcggttggctcaggcgggatggcaacctcgagaagtctctcattgatgaacttatggtcatcacttgcatcctcctttccagtatgaaaaatatccatcttcaatgtgagaagcggcagctctaactttccggtgatgaaagtgaatgcttccgaagcatcctgttgctgaagtttggccgcatcttcccagccacattctgctagggcatcctgtaggtgttttgtctgaaaccattagtcaataccagatatgagcacaataacaagtgttaaactaaccatatctgtggtgataagcttccccgatcgtaacagattcacccatagccttagaaggatcacaagctttcgacgaggctcatcattaaacgatttgtatagaatggcttcaaaacaatcgagacgggcaaacatggcgaacaacaatgcatctaggtagcatgtgacaccttggcgattctctgcacctaggagcttggtgttgggtgtgtaattcctgatgatgccctcaattgagtcctctagtagaagtagcaggccgaatgctttctctgtatcgccttgtgtagcttgcaatgcataactaatgtgatcttcctgtaaggcagtgattcccagttgtttaattcgttgagcaagggctttgacctagatgtgaatttgcaacgttagacaggtgcaagctgaccgttgtgcttagccataccttcttctgatgatcgtgattatctgccagtgaagtctccgacttgaagattccatggaacagaggacgtgaaaggatatgggatgcctaggaagtacagaacattagccaaagatcttgtgtttaggcatcaaagcgttcttagcatacctcttctttgctttgcttgttcaacttattgtgccgatcgcgacgcgtcaggaaccgatgaattccactcattatcacggatcagaaaaaagaaaatactcttaagagcagagtttaaagatcgaaacgaaaatcccatggagacatgcgggggatcatgagaccggtgttccgtaaactagctcacaacttagtcaaggctgcaggatttgggggaaacgcatgtataatgcatcataagtagagctctttcaaaacgaacgaaaagaagtaagatagtctcgaaggatttgaagtcgatggacgaacctctaagtgatctgcggggcagagcgggaacagagaacctaagccggagatcgaccttttgctgccctaaccttggaaagctctccaccgcctaagtccgggtgtgggcggtgacgaggaacttccagaacatttggagatatgaagtatataagtgcatacctatgtgtgtgtaggaagattcataagaaacgacaagactcatataccacttcatcctagcaaaccccaaagattgtcttgctcggtgacatgttcgtctagtcgacgtcagattcagattcttctagaatggaactattacaactatataaatgtctaatttagtggtattccaaaatatacggagtatagcataggaagtctaggttaaaaggcaggtatttacatagtatctagtagggctatgttcttatatagttatatagagccctataagctcctagtcttgtccttatagtacagtagttgttcctcgctctataattgcgtgaaccatacctatatgtatccatggataggtgtaggtattgcattatcattcataccgcagacctgctcctctaaatagccgtccagcgaggagtcaggaccctactaggcaaagattgctagcccactcatcaccccttgaggattgagtaggaatttctagccaacttcatgcataataaggaatatatcccaacaattgcagtagtaggtgcggtaataactcggaacaagccctatgtttggtcattggatttggtcaagtcttcgcggatataatcacatatctaacatctatctaaaattgaaattgggcaattccaccataacggaatatgacgaagacttcagccgagcaataattgacgatcaggtacgtatccatggatgagttacggaggacggagtagttggaggtggatatagtgcctgttttgtaaggcgttattacccagtcctcacgtgacgggattatctgcgcgaacaatttttggtaagggcccgggcttatcctcaatccatcacaccccatttttcacagaatggctgccagagagccgtgcagatacctaacaagggcattgccccgggcctcagtgccatcaattcgccctcaaggctttttctcgagccgcaatgtctctgatgaagccccagccaggcgtctgtcggaccacctaaccgagctagaaacggcgtcgtcgctgtcaacacctgtcccagacagcgcagcagcatcgttcgatccgcttgcacgagcatccgctcgcaagacccagcttccccgaggccggtaagagcactccgactacatcttcggtcatgcgcatctgcagacatgaaaacaacatcgaacatactcaatgaacaataactaactccgacaccttatcacagataccaattccgctcccccaaatacaaccgtggtcccctccaccctcaccaaccgccgccaccatccgacccctcctcccggctgttcgtgccaggcccattctccgcgccccgagcagagcagaccttcgactcaaccgtctcccccgacattatgaccctgtgctacgtgcacacgccaccaggcttcaagccgccgccgaaatcggcccgtctccgcgagtgggacgacagctcgccatatcacaagaaccgtgtcctccgcggtccccgtggcggcgacgtcctgcgcctgctccgcaagccgatcaagttcaacaacatcccggaaatcgagcgcatcacaatccacagctatgtcaagaatgccgcggctgagcggaactcgtcttggctgcacgtcgctggtattgccattcaggccatctccaatgtgcgcgttcagactttcaagtccaagtctaacgttgctccttggggtattgcggcgaaccgtgactccgtcgctgtaaaggcagagctgtatggcgagaacatgtaccacttctttggtaagctggttgatgtcgtcttgccccgtatcaaggattgggagggtgtcaaggggtccagtggtgatagcagtggtaacatcactttcggtctgattccggagaatgttgctcttttcccggagcttgaggtcaactacgatatgtaagtgttctctattctatgtttctattgtcttgtcaaggctaaccctgcttcataggtatcctcctaagatgatccccggttgccacatcactctccacactaccgccaagaccgacaaggatgcacgacttctgttgagtgccatgggtattcctttctacggcaagatcgtgaactaaatcgactacttttggtatcttattatatctccttttggatagtcttgtgatatccagcatgtaactttagagaagacctgcataatggtcgttgttattattggaatcgtgtactatggcttaaattcaatctacatttacggcgaacaacagcacacagcacaggatgattggaaagtgtcaacaggaatctttgctcagttgcatcaactataataccgagaaagcacccatgacccagataatcggtcaataaagggaatatcaccattatacgtaacatcatattacatacatgcatcgagaagacacagaagagacgaaagggaaaggaaaccgcggctaccgctaattatgggataggtgtggacaggaacgcgcaccggagcagttcatcggcagtaggccgctgctcgtagtccaggtggaaagtcatgtcgaggaaatccacagcctcctggctcacattgtctggagcaggggggcgagccttgttgctgccgatagcgaaaatggcttgcagctggctgcagtccgggaaggggtgggcaccaatgaacatctcgacaacgagacagcccaaactccagatatcggcttttttggtgtgtgcggtctgtcgcacgacttcgggtgccatccagtacacacttccctggagggatgtgcggtggatattggcaccagcaccaccactggcccgggcgccgaggaggtgggatgcttcgacacgcttggagataccgaaatcggagatcttaacaccacccttgttgtcaactagaatgttggcacccttgatatcacggtggatgatatcccggccgtggaggtatgatagaccggctaagatttgtcggacaaagttcttgacaaggggttcttggaaggtgttgtactgcttcagcattgtggcaatagacccaccaggcacatactccaggaaaatgttgagatactgatcgtcggcaacggtgccaagatattgcacaatgttcgggtgggacatgccttgcaacagctcgatctcatgcttaagagcatttaccatgaggttcttccgttggtcgaactctgtgccctttgtagcagatgggatttcaacctgcttgacagccataagctctccagtaatagcatgaagagccaggtaaacgcttccgaaagaaccctcgccaatcagagatcccttcatccagttctttggtgcaaagttatttccagccaggaagtccacaaggccatcatcctcttcttcgccatcctcggctacaatcatgctcatgcgatcgttaaaggaaccgccatctgtggccacaacactgagactctcaaagctctggcgcgattgccgcgattgattcgcgtcgtcggagccactctcaaaggagacataggattttcggttgggctcagtgggtgactcttcttgaagtggctgaagggaactagatgctatagaatcccgatatgaggattgaggtaggttgaacttggaaactgaaatgggtcgcgggattcgtactgcctgtgccactccagggccatggagccatgcatcggcaatgctgggaattggaggtaaatggggtaatggcggtaggggaggggcatctttcatacttgatgcaacgctgtagttgctcataacactcatacgactggcggcacgactcaaacgttgagatctgcgcatggtcttctcgatgttttctcggtcatgactggggaagaatgattgtaattcgtgaataatcatctcacttggaggtctctgtccgaagaacgagcggagtttagccacaggattacgttcactgttcggaccttgcgattcatcaacactggagttggatgggcggtgtcgagggcccagcggagaaagcggctgcttaatattatgccaagattcgccggtaagttgctggatcttgtgtttctggcgctggttggaattactcagagcatgctggtgggtggcctggctctcatcatatgcaagctgggatgcacgacgaagctcgtcttcatcgggctccccagcatgaatcttccgtagaatcaagcgacctcgctcggacttgttgtagccatcgcaaatctccatgagctccgattcggtgagcttccggcaatttgacaggtctgggtccagtccgtctaatacatagaaacaataatttctgtattggtgttcaggaagctgtagtttcttcaaaacacacaaaataacttcatctggtgttctgcagttccgaatatccaagaccttggtttgtccaccggtgtgtatgacacggatgacaggggagtttgatgggagggggcccatcgtgagaccgtcaagactagggtttcgaggatgggagctcggtcgaccttcgttcggagtagggggatttcggccagaacttgagccacctgaagatgggtgattaagatagtccttgcgccatgtgcctctttcggcgtcaccggcaggtggcgacgcaggctgagacagcgatttgctgttcagataagcatcatcagccagctgagatgtgcgtcggtatggtagccgggaatgagtatagcgggaagaatttgacagcgccgtggcttcgagcgcagctaaggtattctgtatcgaagatcagcataaagtagaagagacgaccgatttatggcagacagacacccaccatatttttctgtcgtgacgttgctccggatttgtttctgagttgcttgatagcgatgaagatgcgcacccggtcgcccaccttcttgatgcccatctcttgcaggatcttttggtcgcattcgagtaaattatccccattgaaattgttggctgtaaatcatcagtgacatcctgggtgtaaagtcgggacggccgtgcgtatgcgtacctctaaatatcgactcatattgcccacatttgatgctatgaagccatgagaccactcgtctctcatcccaggcactatcgatagtcagaatcactgcggtatctcggataatttctcaaaagccataccggaccgatgcaagctcgtctaacccctcggaaagctctgaccttgttgggctgacaaaccccaccccatcctgggctcttgtagccgtcgccggtctttgggacgaatttgtgtggtatgcggtcgatgattgcgacgcagatacacccgtaggtgcagaatactgcttaggagccaacatggctgagccacctgggcaggtcaagcgaatgactcgtcgggttcacgtgctaatcgcctgcgattgatcgacacagcgttctttccttcactctcggggtccttcctgtcaggtcgaacgggggatccgaataatgataaggcgtcggtcaacacataacctcggcttcctggtattcagtcagcggcatgttccaggtggttttgattctcactcgccccggcggggggttgctgaggggtcgggagagtgaacgacacagcagagacaaccacaatgaatattgaaagacaccgaccagggtaaaacaatggtgattccagcacagcaggcgaaatcgaaatgagggacctcaccgatgcaacttaccgtctagcttttttgaggggcgagaccggggttaggtggtctggatcgggttatcgagatcacaactccccacttgggaacgagaaggtggttgacagggataaaaatcgggaggaagtcaaaggttcaagagatggagtttcgggttggagtttggaatatgaaacctccagggctggaacaccgggagttctctgactaaggtggtacatgcagcccgtatcaagggggaaagctaggcccgatgttctcctccacgcgtttctatctctgagctgtctcatcctagtacccttcggtgttcatccaaaaaaatacgtcttgggctacttagtggggcttggctatacataatagctgctttgatgacttcacctgcgcttgcagccatgaagcaacacgtataattaggcgccctgctgtatatattagttggttcgtttaacgatatataaatctattacactggtatttcccctgctttgaaaatatatacgatgtacaacctctctctataggaagtactcagagactttgataaggttatgagctgtagattatacatattgctctccacccccttgcctaacgctatagattgtcggtctctagaggttgtttttgccgatatattcagtgacatgaacactagttatagacgagctggagctagtaccatatccttttggccagctcagacagagtttcagatagagatcacctcaactttcagattggctgtttcttagatcagttccacaaatttccttccctttaagcccaatatcggcgataaggtactaaaatggaaaggtgagacacacgagcccccactgcgatatgttcttattttttccttttccatagtagtagtggtctacagggtacatctattttacgaattagtatatttgaaacaaggagaggatcaaagaacttctctccgaacgtgccgaaccaatgcttctcaggctacactttggtgtctattagggctttgattttgattggctcctcgtgcttcttaagcttttcatcgcatatggcggctcgcgttcagcgaacatatcactcattttgggtaagagcactattcactaacgggatatgacggtgagaactatggtggtagaaacacatgatgctaaggccgtggacggtgggtgggaggcttaaaaaggtgtcaaagacggcggtttctgacctcccatttgtttcattgatatatagaatacggagtatatatatatatgttctatctagctcctatggaacataggagccaccgtttctgtgaaccattgtattttctttcgtccttttctatctactactacttcatacttcatagatagggcatttagacgggagccctataaccttcacctatagtctacaaaccaagattgctctaggcataatgtctaccccgccaatgcttcagatgtactttccggcctaccctatctataccggacgactttcaatcgagtaaggctctccgcaccagtggagacccgagcgcatgcatacccggcctgggtatcagcatcaaacactaggctcattcccaacaccttccacaccgtagagcaagaggatcggccctttgcatatgtagaatgagaaataacaatctcatgtgtttgtatcctcgagcccatatagttctataacacgtgaccgtcccctcactgtgggggttttagtccattttccccgctcaaacagcccgcggcctcaaattcttcccctccctagtgcgctcccccattccaccccaaaactccaaaaacaatggaggacgaaaaatcagccaaatctaaaaagaaagctgtgactcatcggaagtccctgtcgtgtgaatattgcagtcggtcttttgctcgcttagaacatctccaacgccatctccgcacccgttgagtaaccccctcttgctcccggcttcttggaattcgtctaatgtaggacaacagatacaaaagagaaacccttttcatgtgacatttgctccaaatcatttgctcggaggtaggcttatattgcgctcaatccccggaatagaatgccaatcgcttatcaaatatgaattttccagtgaccttctagtgcgacatgagcgattagtccaccctgctgaaagtgcagccagtcgagaacaccgggttcagaatggtcacgagaacaaccatgaaataccaattcagtccaacctcatccaacccgcccatcatgagtcgcgcatgttagagcttgcagatgccatccctgtccacacccaagtgcctcctccaccacctgaagtccaggtccagactccatcgattatagatacacctcactttaatccctcatggggatatgatttgaatcttttatctcatgccgcaagccatgtcgctttggagggtcaacaggaaagcctagagtccatgagaaaaccacaacacacagccactcctacgtcacaacaacttcctcatgtccaggagagggcaattgccgatagttatggtgtagagccttcgattcttgatctcacggatcttggggaccctgtccaggattttacggttttcctggaaagcgtgggtttgtcgtctgattgggactcgggcgtgttctcgtcggtcgaggagcccatgctaccaccgagtatgacaatcgattcgaaaccgccccgtgagccgataccatcacgacttggcggggatatcatgaatgacccgcggggtcccgcggaagatcccccgtccttctcgaattttggatcccggctgccatcactgcaaccggaatctcacgaaatggacgaccgtatcggtctttccgacgagagtacacgacctgcatgggacatctctaattcggatcgccaatcgttcatttcgaaacttgaagaattttcatatgttctcccgaaaggatttgttccgccatcgcggcatgccctatcgcggttcttcgccgggtatatcaacggattgaacgagcatcttccttttatacatgtccctacgctatcggttgctaaatcctcacctgaacttacgctagcgctggcagctgcaggttcacactatcggtttgagaacagccggggcatcgaccttttccatgcagctaaagcgattttattggagcgactccgtcggcgagacagcaagcaagtgcttcagccgtcatggaactatatatccccatcatcagggtttcctacctctcgtggttcatccatgatttctaacacggcgggcagccctttccaacatcatcagcaaatgtcaaatccacccctcaacccatcaatatacacgctagatgactcagatgctcatatggaagtgattcgaacttttttgctgctgactgtgttcgcgtcctgggaacgccatccagaactcttgcgggagattctctcgcttcaaagtactttggccaggcttgtgcgcgaacatggcttgtctgaatcaccttccacctcagaacctaccaactgggaggagtgggtacggagagaaggtaacagacgtacaaagcttattgtatactgtttcttcaacctccactcgatcatgtataacatacctcctctgatcttgaacgcggagttgaagttaatcatgccgtgttcccacgaactctggaaagtgaccaattccgcacaatggcgtcgcgtttatcgcgccagacagggatcagatgtgcctttccaagaggcctttgccagactcttcctcaagtcatccatgtcaactccgtcggcacctatatccccccttggaaactatgtcctcatccacgccattatccaacaaattttctttgctcgacagctctgtctttccgcacctcatatacagggcactagtttgagacccgacgatttgaacgtactagacaattcgttaggcgcgtggaaggctttatggaagcgcacacccgaatccagcatcgatccccagaatccggccggcccaattgcattcacttccacagctctgttggggctcgcctacatccgtttacatgttgacttaggtccctgccgtcacctcatcacacaagatccagtccaaattgcatcagctctgaatgagtcccctgctatcgcacgtagcccacggctgatcatggcgcttcttcactcagcccacgctctttcaatcccggtacgactaggaattgactttgtggctcgaacgcattcgttcttctggagcattcagcattcgctctgcagtctggaatgcgccttccttctcagtcgctggctactcgccattcccacaacgcactccgagcagagattgtcggagcatgagcggaagttgctcctgtggatcaagagtatgatggatgaaaccgaaatggcggttgatccgcctggcgcaccagatatggaattcatggcgaatccgtacaaagtgcggcagcttagcgttgcgattgtccgcgtctgggcgcgcacttttaagggcaatactagctgggcgatcgttgacttggtcggctcaagcttggatgcgtatgcggatctcctggaatattaatttgattgtttcgaggtctgtcgcttgggaggttgatctttgttccattgagcagagaatctccggcaaagatgcaactgacgtctcttctaagaaaaaaaataatggcctctttggaatggccatcctaatgatcacatgtttctcttttggatgatgtctcatggagttttgtatatgggggactgggaagtaaggttatttgtgttcgatgtttgtttgatctatatgtatgtattatgacttcgtcatttgcttagtgctgtctataccccaccactgtttgttgtggacaatagcaacttgtttctactaggacttgcatatagtgattctctcaaagtaactctttacctattcgaggagtggtacgtaaagtatattcgtatatatttatccattttgatcatgatctcatctctcataggaagggttgcgtattgacatccaaacgagcacaacatatatagacaggactatttgccagccaccttgttgcgatttctagtgacgcttgtaggcacgaacttcagagcagacatagacttttccaggtcatcaatgtccatatccatgtcatttggtggtttattttcagggatagctgctgccggtgggttcgattgagacgccgagcttcggcgccgcaacctgccctccagagccgacgacgttgagagacgtcgtctgtggctgttcatgggccgcagcatagatgtttgcttatcgatgccgtcattgacaatgtagaagttgtaactctgtataatgtgtcagtgacgtaggggcgctattttgatctgaaactcacccggggaaacatgtgtttgtcgataagatgtagccgtcgtttctgcggggttgagcatttccgctcgcagtcttcgatgaagcacccatactttggtttgatttagtaacgtgggggtatagttaaggaggtaggctagggcttacggtcttgtctccacgggcccgccgcgcagcagctagcgggtcatggttctcctcgatgtgtatgttgagcaaatggccagtagggaagttcttgctgcacttggaacagcggttgacatgggattgaagataatggacctcgtagtcgtcgtaggaggtgaacgagagcgtctcgcggtgaggcggtaaggagcaatgcatcacctcagggagaaggaggttggtatcactgtcgatgagcttgttgcgctcagatggaggagtcgtagtattcactgcgattgaggatactgatattgagtcttgatcgagagatggagatctcgagcggcttcggggtcgtttcgacatggtctaattcgccttgcatattattgataggtcaacttggcgagcgtacggaggagtacagcgaccatgcaagacttaatttattcactctccgccttgtaatctttttagaagtctttttatatgcttttcttctgaagatgtcttcttcctcttcttaagctttctggatagatggcagaaaaaggcgggaagggcttatataaattttgatgagcggcgccggcgggttcatatagcgatttgatatcttattgactctacaacatagcaagctacttataggctacgcctctaggatttaagccaagtgtttatgtgtagtattccttaacaatgtgtgttttactttccatcatgttctcctctttttctttagatgtctcttgcctaagggttcgggcaaatgttatagaaagtacgtcaacagtatgatatcaacatctcgtaccaaaaagctcaatagaactagttaaaccagtttattctgaaaacatcggcggacggcaaaaatacctagttaggtcttttccatagatgctataaccctccgcgcgtagtggagcacagtgatctgttaaagacggtataaacctcttcgctagtatacattgagacaatcctcatcttcaccttcctttgacttgcacatgtcgctgtccttatgtcgctgtgcccatgagatgaaataaacccgtaatcagcatacgttacgcgatacctcccgccttggcaacaccaatcatcgcggatagtagaccgagatcgcatttatgcattttcatactcaactcgaatcacatcatccctgtgcgctttcatgtctttcacatactgatggctcctccgccgttcatattccaagccatagccatctgaccggcgaggttgacgctcgggatccccgggctaacttcctgatggcgccctcgttcacggatgcctggaagttagtgctttcccctctcgatttcggctggattgtgaacattgaccagtggtgtgatacaggactgcaatagaagccgagaaagagcttctgcaatgcttctcgcaagaacggcgcacattcgatgaattcgaacatttcctctccgagtcagtgacaagccccgcgcgcacgccaacgcatggctgacctctttcctatataggttccgaacctcttctcagaatgcaatcctcctcgatttcaatgcttcccgcgaggccgatgtggagactcgcctttgggatgcgcacttgaaagtgaacaatcggtttcgcaagcagttgattcgcgtgagtaccccacggaagcttttcgcaaagtatatattcgctgactgtggttgtctatcattagtttcgcgaagagcacggcaagaaaaaaccagtggagaggcggaaactcgaacgccattatctcgatttcattaagtcaagccagcggttttaccgaggatacatccagcacttgtcgtcgcgatttggggggattgttgagttggagagagtggcgcgcaagttcaattttgagagtaaggcagatacacaagctgcgcgccgggtctctaggcacgctgacccgcgtttgtttttagatctgtccggccaacctcctatcaagccctccaaagacctgcgtaggctgattctccagtcttgccacgcaactcttatccggctgggagacctttcccgctatcgtgaatcggaactcgtcagcaaagatcgcaactggggccctgccatcggttattatgatttggcgtcggtgatcaaccctgcttcgggtgcatctcagaaccaattggcaattatcgctctcgcggatggaaatcatcttcgtgctacctaccatctctacagagccctgtcagcccaagaaccccatcctactgcgaagggcaatctggagattgaactccgaaaaatcatgagtgcttgggctaagaaagagctgatccgccccgaagatgccggtatccctggaagggccttgacctcgtggtttctttatctccatgccaaatgttacaagggcaccgacttccccgagcacgatgagttggagagtgaagttctcagtcaactagcagtagagattagagaacgatcactagaggggacacttcaaaagttctgtctcattaatattgcggccgaggattttgctaaggtccggtctattggtaagagctcgaaacattatcattgctcatacatctgcttacttatcttagaagagtctgtcttagaagcacgcgtctttttccaacgcatcaacgtgaagacatttttcaccttactgcaaatacttttggtcgaactcgaacgaactgcttcttttgaagatccgaacagcaaagatgaaatgcctatcccagacaaggtgtccgtggttgctcgtcggatcctgcccgcgcttcgccattacagctcctggctgcttacaaatagcaagtctctggttgagcagaaggaggaaaaagattcggcgctctcgattcaaatcaaagagttctggaaaatctatgccggtacgctgagcctgctcgcatcctcgtttgatgtggtcagccttcccgaggtcgattatctattggaagaagacgaagaaagtcttggttttgcacctctagatcaggatgccacttctcgccgatacgttggaagtcgtgatcagccaaagcccaggatgcacgatcttgggattgaaagaagtcaccccaacatggaaatgctctatcgaattcgtgaattcgtgattgatggactcgacttggttgttaacggagtatgtggaaagctctgaagatattataaacaaacaagcagattgctaacctcgtttagaaaatacccgtggctcttgtggacagtgaagacaagaagacatttatctatcaagaagaggatctgccttcgcaattctattccagccctcatggccgccagaatgcacttccggttgcgagcatcgagcgtgaggatatcccacaggccggtcaaaatgcatactctgccgcagaagcccaaagtctgttcggcggttcccagtctgcatcggcatctatgtccgccaacatgcatcagatcgttgagggcgttgaacgacttgttgactcggacacgtatgaaaccccatccaatggccaatttgctttcatgaattcgggggagatatcgacacctacgcatgtctcacccaatgtcaatgcttacccgttccggaacgaaaactctccaccactcaccactcccatggctcctccacctgggcttggtccaccagtcataaatacagctgagcctacatcggcgcaatcatataccccacggcctgccattcccagcatccctagcatttggacaccactgagagacaccgcccctccacgaacgccccctggccttggtccacaacatggccagcgagctccactgcaccccatggcttctggaaatgccatgccttctgagcgctcgccgtcgcaagatcagttagcaaatgagctcatgctccgacagcacttgatggcccagacccagttttcaagctcactggacgtaggatcaatgcccacaccgtgggcatcatccatctctcatgctcgtcccaccgccagcggttgggatcatggccgagcgaccttcggtgcattcgaactcccgagccagacgatgtccagcagcctgggacatcagtcatgggccaatgacgctttcatcgccagcagcctcgctggggcaactccctacagctccgggattggcgggcgcaagcctgcaacccagcttggagcagtcggtcaaaccccaccctgtggccaaggaggctgattcgaatattaaagctctcattttttagttcttctatgtgcatatgcatattacactaccagctgggcaagctgtcataattaacagtgctacccgacctccaaatatcctggcgtgtactgtgtttgtctgtggtcactgagtctacaagttcaggcctacactgacagtatgcacctttacaacgaccagacgagattgtattactgctagccagtttcacaaatggcagatcccgcactagtcctctggtggcgaggacgcttatggctttttttccacaattgcaggaacttcttcggtcctcgctctcctcgcaattttgtctggacggatacgtgcgttcaaccacaggacatgatcaatacgaggatatgaacatggacaatctgccattggagaagacatttgtttcgttctgttttctgccttttcttctttttcatgcaacatggccaggaaccgcgttatccccatcaaccttagcctcgtcttttctatcgttagaagaattctagggcgcggacatacggtgatctttgaaattagtatgggcctgcagattactcggggcctattaccctcttgacaccatcgtgtcggttaggcaattgaaattcaaatttgcattttacgtgcttcttgtagtatctacggtatgggctctttcttgcggataatagaagggtagatcgcctaaatactttcatttatcaggtggccgttacaaggacagccacaggtaattagacaagattctcaaaagtatgggttttgttcgctttttcagacagtacgttgaagtcatgaaattttaagaaagggaaaaaattgggtatagagggttgaatcatccaaagtcaagtggtgctcatccagttgttgaactggatcgcacaaaaccttccaattaggttggtagatatgttgaaggtgttggtagtctatgctttttttcgtagcctacattatgaacgcttaggagcgggagtaggtctgcttgggggaggggaagctgcgagttaagagttgttagctagtgttcttgcaatgtattactttgggaaaactcacgaaggtccaagctcctggatgctcttgctggcgagccactggcccatgtcgatgctgtcatcgagggacttgcccgcgacgataccagcgcagaaaccaccggcgaaggcatcactataaggaatagcaagtcagtatatatgagtggattgttcagatcaatatcactcacccagcaccgttggtgtcgttgatggcctccttggagatttcgcggaccttgaactccttcacctcgacgtcaccggtagcagagccgatggcgacaatggtggggagagtgccctgagtgacaatggcaacacggggacgttgggtgttcttcttggggagctgagcgagcttcttggcgatctcagtgatatcctcggtgccccactggtggccctcggagtaggcaatggcctcagtctcgttgcagaaggtgtagtcagtgtagggcaggacgctatgcagctggtccttgaagaactgagcaatgaaaggggcagagagagacagcatgaaggtctgacgaaaataaatagattagaaaaaaggtccaatgcagcagaatgcaaacgacataccttgttcttagcggcagcctcctcaccaagggcaaggatggcgggaacacagacagtcaggtggtagccaccgacgtagtaatgctgggccttctcgaccagagaccaaacctcgggctgcttgaggtgctcaagcttgtactcgttggcagcagcgaggtgggtgcacatgctgcggtcgtggccagtgatgacaacaccacacttaccggtgggctgggtctcgtcgatacggtactcggtgtggacaccggcctcctcgcaagtcttcttgaggatctcaccgtacttgtccttaccgatacaaccgatgtagacaacggagttctcagggagcatgtactgagaaaattgtcaatatcaatcatggggatcacgagggtgttttaatccatacctgggcaccacgagcggtgttctgggcagcaccaccggggatcagcttggcatcgcgggcaagcaggtcctcgtagatacccatgtgcttctcctcggcgaggatagcatcattgggcttcagatcatacttctccaggagagcggcatcgctaagaaatatcagcatttagaacttagcaccattttacttcaggttcattcatacccacgagcctggatgtctgttgcaagcaagtcagcattttataaacatgtccagatgatccttcacataccgaggagagggttctccagacacagaagagggtaaccttgagcagcagccattgtgatataattaatgagagattaaagagaattgagaatggaatcgaagtaaaaaggtgggagaagggtgggaggatgtggaggatatggaggggctggcagaaaagagcggactgcgtatccgcggtcccaccggtaccagccgaacaaccttgggagctacttctattcaccccaggctgctcaccttcgtataaaaacccaccaaaatggccgaccatgctatggatatcccgcagattctccaatccgcgagcatcaatcgcaatccagacccatctcttgacatcaatccagccaccacagcttcggagaaacgacccgtcgcggtaggcccagactccgaaacaaacagcattgcctccgacgttgtccatccaagacaagtaattcggccggtccgccgccgacacactcttcctcctcttccggatctgcgctttgagcagagctatctagccagcattaaggatgctgacacctggggccgagtagcgtggattactactagggatcaggtatgcatcaaatgattcctttggggtgtcaaggataatctctttgataatgcctggctaacatgtcaatctttccattctaggtacttctccctctgatccaaggaaccgtttggacactcgcgctctccggctggcgtttctggaaccgcaatgcttcagtcagcggacacaccctcggcagtcgtgttcgcagatggtggtacgaagtgaacaactggcatctgccgcaattgggctcgaccagagatcataagcaaatgtcgcaggttgaaaatgtgagtacccacttcgccaaacataaatttctcatctgatctcgaccagaagtggagaggctgacgctcgaggagtttctgcagttttacacagcccagttctccgatgcaggctctaactgaggtcacttctgcgctggatgcgacctgtctagtgtacactgtattgcttgcatttttggcgtttgcgctgttgggggcgcctgcttttgttgattcccatttcttatatacctcgactctactatatagtagattaccttttttttgccatatctggcgtaccgggcaaacctcatgggctgccgcgtcagaacacaacatttgcgttgtcagttggcataaatctgtatacatagatctcgagtacgtgccattcgaatttagtgttgtctactgtgtagtgaacttattgattatgagcaagacaatattttgagcttcattccatcacttcgcgtgccgtttgtaccgatataatacacacagcctgatagaagtacaattgcaatccaaaaagatctatctagtgacatttcgtagaatatatattcctggcctctttctagtccgactaaagcgaaaacacctattctgaagtgaatccgaatttatagctagatggttcaaatttgatccacgccgtttgaagaaacggatggcgcagctaccgctgcagcagaatgagtcggtacttggggtatcgaagcaaaagggtgtgaagtggcaatcattgtcggggcttgctgcgcatccgagtttgattgatggagggtcttcggcggtgcttgggcggaggatgctgctgcggtttcttcggcaatttcgacttctttcgccggaggtgattttttgatctggacctctagattgctaggtgcatctcccttgccatatcgaagttgcacaacaaggctttctggctcctcattgccgcttgactcatctgcgcttgcttcgtcctcttcattatcgccttcgacatcgtgctccaaatcgtcttcaacgccttgccattcgttgccgctttcattcgcgcttgaaggaacttcagatgcatcctccaaatcatcggcgtcgtatccagagtatccgttggggtgggttgaagtgcgagccctttggggtctgattacttcttcttcatcatcttcatcaaactcatcatcatcagctccgttgcgttgaccaatcaacagagcctcgccatagaggcccccggcgcgagatcgaatctgtctcccgcttgccgtgaaccgagggcgtctagactccgtggaagcttccgtaggagctgcatttctagtggagcggcgagcggaaggctcatcatcatcagaaaagatgtcatcgtcgtccgagtatgtgtatttcagtttcttgccgcgtgtacgaccttcatacatggagaacccaggatccggacgaacgaacgcagctttccgagcgagacggtattcgcggcgtctccgtttctaataatttattagcaaaatccaatgtactctctaggtagaaaatcacctcttctgatgcctcaaatcgagggattgaagcgcgaattctctcgctaagcttcttggagtttgtgcctttttcgccctcgagtttctccacgacagcctccagctcaggaatactccccgcgatgctccaccaagtgttgtttttgagggccgggttactttcgcggtaaaggcggaaatttgtatcatcatgcccttcgataagccaataacggcgtttcaggctatctctgccccagggttggacagacaatggttgattgagatcatcatcgtggcgcgcctgcttgtaggattctttaatcttcgcctgaaccgcttcggacgacgaaagtgaccacagtatcaaggttcgcaataaacgcagctaagagaagacatgtcagaatcgccaatcgggtgtcgtggctattaaaaaacatacacgttccacgggtgacatggtcgcaaagctgccacccccatgaagagggtttttgccctcccattcttttggccactgcgcctgatgtgtatggattgcttcttcgaggggacgcgtgaagtgatttcgtctgtatattcaaatattagataagcacttgacttggcttgacaaccgatagcgtgcgcgtcttcaagcactccgcacggtatcgggcgacaggtggcgaacatactcaacttctttcttgcggttcagaacaagcccaagcaatgcgcatagaagtctttcgatgtattctccggggggcgactcctcaatgcccttctcaatatcctgtgggccgtagtgtggcacacctttggggaacacttcatggaaacgcgcgcggaacgcgacgatgaactaaagattgcgataacttagcaagcgtgttctattgttggccaaacgcgtcatttgtccgtagaccaagcaatgcgcaaatcttcctgccaaatagactcactgcaatatcggggttgtcggccacgacgtattcatgcggaggtgacggttcccgcttcggtggcggcgtctcagactccttcttgaagtactttgctataccagtcgggtggtcaatcgccatagtagcttcgtcatccgttggaggtgccgatgataatgatgaaagttctgaatctgaaggcatggtggaagtgatggggtaggtggaaggaagaagtaagttgcgcgcaatcgagccgtcacgtctgcacgtacggcaggtttttgggtccatcgcgccaacctatgtgcaagcctttataagcaggagattatttctctattttagagcacatttgtgcaaactcgatacatgccctactctaaaatacctataatatctaactatatcccgtagagaaagtctagcgctataaaaaccactttgttatcatctttctatcgctattctagggctttttagaatatagccactgactatccccgaatattgttagtaggagacatttgatacgaactatttctagacttttaagagaatacacttatgtatcaatgttgattcatggcagccggttaaccttcctagcgcgatggacacaaaaacctgccgtatgcactgggcttgcgcccgaggctattatctcaaggattccggagacaactgctccatttgtttgtaacatattttaccgaggctccttattgtcttctgtaagagaatgaatcaaataaatgagatattggcataaaagcagcttgaatttgcaaattactgtatagaagtagagctgagctgagagactggtgaagctctatttggtattttcaaaaccccaatcaagtcaaagagatgtaatagcgcagggagaaatgaatgtgactagctgggacgaattcacatatctgttgctttcatactagacctcgagaagtacgcgacgagctttgtgaaccattggatattgacatctgtaatgtttgagaggcaagtatggcccaaggctgtttaggcctcatttaattaataggtccacacaccaaaaccatagacagaagcatagaatatacagacacaggtgtttcgaggtccaaggaagagagcaacactccaaaatgaaaagtcttggcgatatctagtcttggcaatcacgtgtgtgctgatgacataacctgccctctcaaaatctacagggcttgcactgaaagagtctcttcaggcgtcaaatggagattatacagagatatttcagtcgaaagcctttcaaaatactctttttaatttagtaatgcaattattatctataatcaccatataaacctagcggttaaaggcctatttcagaaatgctgtagttcaagccaattcaagtaagcgaccatgcgctatacccgattgggttagattagcgaccgcaccctaaagcccacacaagtccccgtgtccgatgatttctcaactcgtcaacgacaagcctatttcacttcgaggtacgcttaccacttttccacgacacttctgtccggcttccatactaacataggatcctcgtctagacagtcgccatgggtcgtgtcatccgcaaccagaggaagggccgtggctccattttcagtgagtgcgaccgcaaaccattcccgcacgaaattttgaggctgcgcatcccgagcagcgaggaggaaatgaagaataccattggaagaccacacagattcgcaaggagattggagtgctgattacgaatttttctctactttacagcggccaacacccgcctgaacaaggcccctgcccaattccggaccctcgacttcgctgaggctcacggttacacccgtggtgtcgtcaaggagatcatccacgatgccggtcgtggtgctcccctcgccaaggtccagttccgccacccctacaagttcaagatggtcaccgagactttcatcgccaacgagggcatgtacaccggccagttcatctacgccggtaagaacgctgccctgaccgtcggcaacgtcctccctctcggctccatgcccgagggtaccgtcgtctccaacgtcgaggagaaggctggtgaccgtggtgcgcttggccgtacctccggtaactacgttaccattattggccacaaccccgaggatggcaagacccgtgtcaagctcccctccggtgccaagaaggtcatcaagaacaccgcccgcggtatggttggtatcgttgccggtggtggccgtaccgacaagcctttgctcaaggccggtcgtgccaagcacaagttcgccgtcaagcgcaactcttggcccaagactcgtggtgttgccatgaaccccgtcgatcacgtaagtttccgtctatacacagatccgataacatccaggaccgcaatctctaacatctctctctacagccccacggtggtggtaaccaccagcacatcggtaaggcctcgaccatctcccgctacgctacccagggtcaaaaggctggtctcattgccgcccgcagaactggtctgctccgcggtacccagaagaccaaggattaagggtgctttttcttggagttattcttgtgacgggttgaaaatggaattctgctatgagacaaatgtacttaggcgcctgcggatgagcgtctcatgcgcccttagcgaattaagcttgtggtcaccatcctttttcttgtcgaacaaatcaaagggtgatgggaaggggtccggggttggcctctacagggcagaaacgaaatcaaaaagtcctccgggctgtggaatgatacacctttaaatttttactcgttcctatccatcaccttagtagatattacagtctagtaattcatcggcatatacatttcgatgcatgatcgttgtcactattgccagtgccatacagtggtgaaacctagcgttccacagaaaggtttgcatcacttgttgtgttatggtcctatggatgtatatatttagctctcaacgttgaccatgtatatatatgaacctagcacatatctcagcaatgtagtctaaccagaaatacaaggcatcatgaggttgggcccataattaccagcccaaacgaggttagaagcattatatatagtccgttatgctcgttgatatgtatctcgtgattctacacaacagatgtgcaatcggaagcccagatccctgtattatatgcctttgtttcttgcaaactgcctactataataaaaaaaggcatagctctggtgtaatcgatttgggaagtcaactgtgtctgtcgtaggttgacgacgtacacgcagatcaatgtgtactacgccaatctatccaattctgcccccctttcttcctctcccccaaaccccactcaattctataacagtaatttacttccatgaattggaagataaatcacagcattctcaccatgtcatccccacttgatgaaaatgccatgaaccagctacagtctgaacagtcagaactgctggacaagattgacgagctgcgcgccatcggagttggaggccttgtggagctgcctcaaatcatcgtctgcggcaatcagtccagtggaaaaagctctgtattggaggccatctccagagtgcgctttccatccaagagcaatatctgcacgcggttcgcgaccgaaattgttcttcgccgaagccctcacgacaggattaaagtatccatcgagcctggggattctagggagaatgagcaggaacgacagaagcttcgagccttcacctccgaggccttttcctctagtggggacctccccacactgatcgaaaaagcgaaggaatgcatgggcctttccagcgccgatccttcgagcgttggatttagcgacgatgtcctcaaagtcgagatctcgggccctgaaaagccagagttaactctagtggatctcccggggctctactactccagcagcagcgaacaaaccgagcaaggaatggtgatagtccagaaactgacggaaaagtacatgaaaagctcccggagcatcatcctggctgtcatcagtgcaagggccgattatcatatccaaaaggtcttgaacatcgcacagacctttgaccccaaatatgagagggtcttgggcattgtgacgcagcccgatatccccgaagcgggctcggaggaacaagaaacttatatacagttcatcaaaaacgaaaaagtcaagctgcaacttggatggcatgtactgcgcaaccgctcgtttgaaacgtgcagcatttccgatgacgctcgagacgctcaagaaaaggatttctttgaaaagggacggtgggcttcccttcctcgagatcaagtcgggatcgaaagtctgaggcatcgcctcagcaagattctacttggtcatgtccgtcgcaatcttcctggtcttattgcggacatacaagagaggatttctcataacgagcagacactagcaaaaatgggcacgccgcgcactactcttcaggagcaacgccgtttccttgttgatatcagcagcaaattcgcgcgaattacagaccaggctttgaatggatcgtacgtcgatgagtttttcggtggattccaagatcatacggcgaccacaaaagagtctcctttccgccgactgcgggcagtaatccgtgagcttaacgagtgctttgctgaagcgatgagcattcgcgggaaccggcgaatcatccaattccctggacagtcaacacctgttgagaatgtcgagcaagagagatccaagccttatatgagtgattggacaccgcagtacatttcccaggagtctcttgtggatgagatcaaggaacaggcccgacagagtaggggaattgagctaccaggtagtgcgaaccagctacttgtggggagtttgttccgagaccaatgcgagccctgggaagcagttgctaaatctcatctgttgaatacctgggattcggtcgaatactttatccagttggtcctgaagaacctcatggacgatcagacccgcccgttgcttatgcgacacctcatcggaccggaaatggagaagatgaaggagtctttgttggaaaagctcagcgaattgacctcgtactataaaaggggccatccgttgcctgtagggacatcatttatctccaagatccaggagtccagaaagaaccgccagattgctgcgttgaaaaagaacctccagcggtctgaatttgccccgacgggagtggatactttcaatgtccgagatctagagcgagcgacatctcagctacagtcatccagcgatcagtttgcagcagcagagattattgaccaaatgcaggcctactacgaggtgagctagacgtcgaaatgagatatcgggtagttctaacaggccgtatttgcagactgcgatcgtgacattcgtcgacaatgttgccatcttggctatcgaaaattgccttctttgccctttggagcatatctttaccggcaagactgtacttgaaatgaatgatgagcagattcgacaaattgcaggagagccatcgaacatccagaaggatcgggaacgtctgaatgaagagctcgaaaagctccgaaagggaaggcagactctcaatgccttcgttatagcggactcttcgctgcgtgctcgtcctatcttgggtacttacattccatataccggtacatggaatcacaggctaaccgaaatatcatctcagcaggaccgccaaatccccgagctagaactccaagccgtgcaggcacggctccgatagctcaggtggcgcccaatactcgtctgttctcgcgagtttcacctgctgtcactggtaagtagctcttcaaataccacgtcgatatgtaaaagctaattttcaagcagtccctgctgtgtcttctcttcctgtcgtgtctcttcctgtcgcgtctcctctccccatccttccttcaagtcaaggaatctctgatacagctcagggttctttattccgaaatccagggaatggcggatctttattccgagacccagggaatggcgagtctttattcacaggctcattgaatagcggatctttattcacaggctcattgaatggcggatctagacctaacaatggagccaccaccacgctgggttcattcggtttgtcacccggtacaacatcggccaccgggaatgtgtctagcccaacggtcaatgggacgtttggttcgaataaccaaggctctaattctggctcgtcgtccgctcctttcggaagttcgaccagcccaactcccttgtggaaacctctctttaacgcgacgacagctccaagcaccttgggatacaaaccagcgtaagttataggatgcgcgggacgggtccattctaattattggtcaccttgtataggtatcaggagagagagcgcgactcaaatacaatgaactattaccaaacccttggcgttatgcttccattttctagctactcctttgaggtgtgtagatcctttgagtcccttgagatatagtcaacacttagtactatatgtgaagaaggaaagatattgacatgaacttggttaggagcttcgactcggagactacgcgcgaatggacaaatatctctcgactttgccattggctcgttgagacagaatctatggtaccttcaattgttgttggagtggtgtgtatagtcatggcaaagttgcacaggaaccgaagattattcggaaccaggaaggcaaaatacaacatttagcataccaagtaaattattcaatcctacatgtacatgctatatattgtaggtagccctggtgtactaagtacaccgttgtacattgaggcattgggtagtctggacgctgattggtcactttggggtcaaaccatcgcctaggcagatttcccgaagttccctctacctggagtaatttgatgccacaatgaatacaatatacaatatctcgaagatatctatagtatgaatacccggaaaatgacagacccatccaagccccagcagatcccccgactcaacccgaatcccctcaccaacccggaacggtggcaagccatcgcaacccgcgacataaccgccaacagcttcgtctacggcgtcctgacgacaaaaatctactgtcgtccctcctgcccagcacgactagcccgccgcgccaacgtccagttctatgacaccgccccgcaagcagagaatgccggcttccgaccctgcaagcgctgccggccgcattcgggccagacggcggctcaaagcaaccctcaaaccgccaaaattgacacagcctgcgagtcaatccggagcatcctgacagcaggactgaaaccgaaattaagagatctggcggccgaggctggcttgacgcctagtcatttccaccgtgtgtttaagaagcacgtgggcgttacgcccggtcaatatgtagagagtcttgggcaaagccacctgcactcaccggaatcatcgccatcctgtgcttttcctgaaggtggaacgccgcgctcggcgttgggggataggggtggtgaggtgttggatctagattggaatactagtgagaagggggctggtctgtcggttgctaggggcaattttccatttcccagtggctggaatgaattcgatgctctgctggcatctgaatcggaacagacgtggatacctggcttatctattgaccctcgaatgaccttggcggatgtttctgatcggaccatatgattacgatatggatacttgcactggagacgagtatatatattcctaccaataataacggaccgaatggtggatgggaattttcgccattttactccgtcggatttgacatgcaacttgttgtattgtggcgatgcaacccactgatagtcgttggatcttgattcactgttcaccgtaactcgcaaatcacattggaccggtccagagccagggaccaactgaaacagttttgaaacctttttttaaagccaacgcatgcaccgtgcgagtattatacgagtaatacggagtatgtatatggagtgcatagtttagtacggagtctatccaaggttattgtatactattgggctccatataataaggataataaactagtagttcactaatgccactactttataagtcacattctaatattccctggtggcaagggataattatagtaattcaacgcctccaatgggatttagtggctctccaccagttggtccactaacgcgtgtcacagcgtttactgggggtggttctccccttggtggcaggctattttagggctttgtatggggatacgccggtacagagcacggagtactacggagtaccttcggacgcaatatgactgtcgcattagggacttggtagttatggacatttcgttatttcgttatttattcttcttcttattcgtttcttgcttcaatggcaataataagagagtacaggcttccccactgattgacaagatcggcgttactgcatgcataaaaagcattgtattttgttgtaacttgtatgcgaatattcgattttatcataattgcgtgcccccccggcatttaatctaattcccaacctcctttcccctccccctcccccgtcttttctcctgatcctagagcattctagacattcccttaccactcccttaccattcccttccaaggttgaccttttattctacacaatcgctggtttcgattattcttccgcataccattatctctcgccaacatgcacgtcaacaagagaatcggcagattcaaacaatgggctggagaacgcatgggcggggaggccaagacctgcctgtctgatgatttcaaggcaatggagacggagatgggcgtgcgacaggaaggtaagaagtggccacactccgtgcctgcagtgtatccatactgacaaccgctctctatctctaggcgttgagcgcattcataaatccatgacctcctatgtcaaggctatctccaagcgcaatgagggtgacgacaaagaaaagaccctcccgattgcccaccttggaagcagcatggtggcccacggcgaagatttcgatgggaactcggaatacggacagtgtctgatcagtaagttctgaagacgacctggggaatgcggcgaaaaaaatcgaatccctaacaattcgatcagtgtttggacgcaccgaggagcgtattgcgcgcatccaagagaattacattgcacaggcgacttcaagctggcttgagtccttggaaagatccctgactcagatgaaagacctgcaggtatgtttttggaccgaaggttaaagttgaaagtcaatattaacctgctcatagcatgctcgcaagaagctcgacagccgccgactggcatacgatacttctctttctaagatggagaaggcgaagaaggaggacttccgcgtggaggaagaactacgctcccaaaaagtgaagtacgaggaagctagcgacgatgtgctgcgtcgcatgcaggacatcaaagaagccgaagtggacaatgttatggacatgggggtgttcttggacgcccagcttgactaccatgaacgatcccgcgaagcccttttgcagctcaagaatgaatggattgggtaagcattgatctagcctttgcatcctcgtgtgcggtactaatactgaaacagggacagccaattacagccccctccccgtcggccaacccgtcctcgtgccaacactgcccactcgttccaggaacggtatgagccgctgcaggaggagtcgattaatgagactcgtgctcctattagaccagccagatctattacaccatactctgactcgcccccgcgagatgcctatgggaatgccagtgtctcgcgtcccgttctcaaccgaattcctacatttgaaggcccgtctcaactgcgacaagaacaagcgccagttgcatcacagtggctccagcagcgaaccaccagcgagaatctgggcgggtttggacgtcgaagcagcacccaagttgggaacggtcgagtctctgctgatccttacgccgactccgaagaggtcagctcatatggccgttctagccccgagcggatatttagcgggggcaggtccatatccccagcaacatctcacggcagtacgccatcccggagacctagcgcaaccaacttgaacaccctcggatcgaagaaggctcctccgccccctccaccatctcgtgcgaagaagccccctccccctccacccaccaagcggacccttcttgcggcaccaaatgcgtaagaacgctctgaactttgaagtgcatctcacgtctgttcttgatcttgagcatggggttttggagtttgggagctataggttgtggcggtatctattcttatcattccgtcacggatgccttgagtgttacaggattgttctgtcctttccttgattgttctttctagtttgcttttcccatgattcccatggaggtctggaggattccccggctgctattagtctcaacgcagagttagtaggttgatgataaaagtggatacctgcgtcttctaagaataggtagcgaataggcaaatccattcaagtctttgttcatttataatgatgatcttcgatcgtgtcgatacccgttgacagccagggtggacccggtatgtctggctttacaatgtattgtcatttttattggtcattgaaatgaagacaattcaaccgattcaccctcattccatacacccaatgtccgatcataaaaccaatcctcttcttttataaccacctcccatagtagccctgatatcccaaaccggcacggtaccagagctgcgctgccccaagccacaattcagcacggggtcacgtgcctgctgactaacgtccgttgaaaaaactccttgccaggctgttgtcagtcctttgctctgagcacccagatttccccgagcctgtcgcgcaactccgttccctccccatctccattttcatccatccactttttgaacgcgccatcccaacgcgccttcaacttttgagcttcccttccaccttgccttaccctgggaatccgcctctttactcgctttctttgactcccttgtccctgaagtacccgacccccccccatcgcatcggaagctccgaccacggccccaaacatcacgtctgccatcgccaagcatcgcatacagtcgctcactgatcgcattcacccataattaggcctcccccacactgtcgccgcctctttatttcgaccacgatcgccacttctctcttgcccgcgcgatttggtaattgggaccaggtggagactgtgacttgccacaactccgcatcgactttgatattgctcaccctagatcacgtcgcttgctgatgaattaaaaaaatacacgcgttacgatggcttccttacacccagcgccaaacatggcgcctggcaacgtgagcttgccgtctaacctcacgcagcaaaatgtccaggagatactccaggtaagtttgtcgcattacaactacacaactcgttatatatcaattcgttattccctcgacgcgccttcctattacatgccgtctctaacgttatcgcagaaatacaagcaaatgcaagaacagggtgttcgccctgatgacccggaattcctcaaggctcacaacctacttgctgctattcaacggcaacaggctttccagaaacaacagcgcatggctcagcagcagcgccaacagcagcagatgaatggcgctactcctgaagctgccaatggctctcatggtaagttttgtcttcacctccaaatccaaggtcttctacagggttgacacatattcttacaggtcgcacgccctcgacttcctcgattgccgcacctaatgccccgaatgcctcggcggttgcccagaataagaatgcgacggttggcagcggtagcttttcaccagagcaactgtctactcttagaaaccaaatcttggctttcaagatgctgtctaagaacctcgccattcccccgcgtgttcaagaacagcttttccaaaaccagaagaagtcccaaccgcctactcctacagaaaatgttgctacagccgaaaaggtcattgaagctgccaatgacggcgctggtagccagcctgcagatagctcagatgccgaagtcctgactagggagtggtatgacgacttccagtctccatatgactcgctctccaagactattagctatactgaccacgccaaccgcgcaaaccgtgtacgcattcccgctcttttgccacctggcatcgacttggagcagatgcgcgaggatcgtgaggtcatactgtataataaaatcaccgcccgcaaagcagagcttgcccaacttcccgccaacctcggtgtatgggataccagcaaaagtgacgcaccaacatacgatgactccctcaagctgaaggccctgattgaatacaaatcacttaatcttctacccaagcagcgactgtaccggaagcagctccagagcgagatgttccactacagtaacctcggaatgacagccaatcgctcaagtcaccgccggatgaagaagcagtccctgcgtgaggcccgtatcactgagaagcttgagaagcaacaacgtgatgctcgcgaatctcgagagaagaagaagcaatacgatcagctgcaagccattctcaaccacagcgctgatcttgccaatgcttctctccagcaacgtacgcgctcgcagaagctgggtcgtatgatgatctcgcaccaccagcacatggaacgtgaagagcagaggcgcgtggagcgaaccgctaagcagcgtctgcaggctttgaaggccaacgatgaggagacatacttgaagcttttgggacaggctaaggattcacgtatctctcatcttctcaagcagaccgataatttcctcaagcagcttgctgcatccgtcaaggaacaacagcgcaatctggcgaatcgttatggcgaagcgcatgattacgatgacgagtctgatcaagagatcgcggatagcgaaaacgaggatgacaatcacaccgccactggaaagaagaaggtcgactactacgctgttgctcaccgcatcaatgaagaagttacttcgcagcctgacatgctcgtgggaggtactcttaaggagtatcagattaagggcctgcaatggatgatttcactgtacaacaataacctgaacggtattttggctgacgagatgggtcttggaaagacgatccagacgatcagtttgattacccacatcattgaaaagaagaagaacaatggacctttcctggtcattgttccactgtccacgctcactaattggaacaacgagttcgataagtgggcgcccagtgtgagcaaggttgtctacaagggcccgcctaatgcgagaaagcagcaacagcaacagattcgctggggtaacttccaggttcttctcaccacctatgagtacatcatcaaggatcgtccggttctcagcaagatcaagtggacacacatgattgtcgatgaaggtcatcgcatgaagaacacacagtccaagctcagcagcactctctcaacctactacaccagtcgataccgtatcattcttactggtactcccctgcaaaacaacttgcccgaactatgggctcttctcaacttcgtccttcccaacattttcaagtctgtcaagtcgtttgacgaatggttcaacacacctttcgcaaatactggtggccaggaccgtatggatctgagcgaagaagaacaacttctcgttattcgtcgtcttcacaaggttcttcggccattccttctcagacgtttgaagaaggatgtcgagaaagatttgcctgacaagcaggagcgcgtcatcaaatgccgattctccgccttgcaggccaagttgtacaagcaacttgttacgcacaacaagatggctgtcactgatggcaagggcggaaagactggaatgcgtggtctcagcaacatgcttatgcagttgcgaaagctctgcaaccatcctttcgtctttgagcctgttgaggaccaaatgaaccccactcgcatgtccaatgaccttctttggcgtacagcaggaaagtttgagctgctcgatcgtgttctgcccaagttccgtgcgactggccacagagtcttgatgttcttccagatgactcagatcatgaacatcatggaggatttcctccgccttcgtgggatgaaatatctccgtctggatggatccaccaagtctgacgatcgatcggacctcctgaagcagttcaacgctcctggatctgaatatttctgcttcttgctttctacccgtgcaggtggtcttggtctcaacctgcagactgcagacaccgttattatctacgattcggattggaatcctcaccaggatttgcaagcccaggatcgtgcccatcgtattggtcagaagaacgaggtccgcattttgcgacttatcagttctaactcggtcgaagaaaagattctcgagcgtgcccagttcaagctggacatggatggcaaggttattcaggccggaaagttcgataataagtccactaatgaagagcgagatgcacttcttcgaactctcctggacacggcagaagctgcggaacagatcggtgatcacgacgaaatggatgatgacgaactgaatgaaattatggcacgatcggaagaagaaattcccatcttccaggagatggacaggcagcgaatcgccaacgatcaatatggtcctggccaccgctaccctcgactgatgtccgaacaagaattgcccgaaatttacatgcaggaggataaccctgtcactgaagaagtcgaggttgaggtcactggccgtggtgctcgtgagcgtaaggtgaccaagtatgacgacggtctcaccgaagagcagtggttgatggcagtggacgccgatgatgatactattgaagaagcgatcgcacggaaggaagctcgtgttgagcgtcgcaggtctaacaagactggacgtgatggagatgactcttcacctgagccatcgattattgatgatgacgagacccctcaaaagcagaagcgccgtcgtggtcctcctcccaagcgcaaggccgaggaagttgtggaagaaacgccacaacctaagcgcaagagaggccgccagcctaaggttccggatactctcaaccccaccgaccgtgccaacttgactcgcattcttgacaccgtgatccagtcgttgatggacatggaggctgaggtgccaccagagggttctgatagtgaagagggtcccatggtccggtcaatcattgatccattcatgaagcccccgccgcgttcttattatcccgactactacatgatcattcaaaatcccattgccgtggatacgattcagaagaaggtcaagcgggccgattatcagagcttgagggaattccgcaacgatatccatttgctttgccagaatgctcgcacttacaacgaggatggcagtgtgctattccaggatgctaatgatattgaggtaagtttgattcttgtcgattatcaattattatactaatgatacaacagactaagtgcttggtggaattgcgacgactgacggaagaccaccctgagctcgccaactttgaagatcagtacaacggtgaagggttctcgggcgccgacactccgcttaatgctggcactcccggccagccgaagctgaagctcacctttaacaatcccaaccgggatagcccaggcactttacacggcaatgaatacggccttggcgagtgattgttcaacactgggctgataacctaatgcagccatcccacgcttcatatagcgcctgcgactcttcaagttgctcgtgcttcttcttgtcatgtgtaatccgaaaatacttttttctcccccacttctgtgccatctaggaaaggcgttttttctcgtgagtttttgttttcgacattggggatggacttccggaggatggcgctgtattgttccaagcgattgatttccctgggtgtgttgtcttgactgcatgacaaagatccgttttgtgcaagaccaccccttgtatttgatgagtatgtacctgcaagttaggaacaattcgaattgatttgaaccatgtacgttgtaatattatctattgcgagacttttacaattgaagacatacgtcatttgttttccaaattctgtccttacgcgggggcgcccaagatgctgcagatgctcaccgatctttcagatcacataaaggtaaggtatcgccagcagcactcccttctaatacagacacactcttccatttagtcctcacctcgcaactatgtccacgaacaaagacctagccggcaaagtcgcaataagtaaggtctacaaccaccccaagagccagtagactaacagcgaaacagtcacaggctccagccgcggcatcggcgccgccatagccctaaaactcgcccaacgcggagcagacatagccgtaaactacgtctccaatgccacggccgctgagtccgtcgtcgagcagatccgcgctcttgacgtgcgcgccatcgccttcaaagccgacgtctccaaggaagaagaggtgaaggccatgttcgagagtctgcaccgtgaattcggccgtctggacatcgcagtcagtaactcgggcatcgagcatttcgggagtctgtctgaggtcaaaggcagcgatatcgacgctgtctttgcggttaatgtcaagggacagtatttcgttgcgcagcaggcttatcgcttcatgggagattacgggcgggttattttgacttcgtctatttctgccgttaaggtgagggctagagttgtagttttggtggtttgttaggttggagacggagctgacttctggtctgatttagggtgtccctcgtcatgctgtctacgctgcttctaaagccgctgtgcagggtatgaccaagtgtctggcgatggactttggtccgcgaaacatcacggttaactgcattgcggctggcggcgtcaagactgatatgtatgctgagatgtcggctaagtatatccccggcggcgacaagatgagtccgcagcagattgatgatgtcttgagcaagtggtctccgatgaatcggcctggggaggttgaggatgttgctggggttgtgtctttgattgctagccctgagtcgcagtggttgactgggcagacttggcaggtttctggtggtgcttatatggtgtagttagatggtgtaaatggttggaatgggactaatccaatctgatataaccagggatatcacatgatcatcctaagctttgttcttgatctctcgatagtcacgaatgcggatgctagtgtctacctggggatcctaaatatcaacatggcactacacacaatccgaccccttttcaaaagaacctctagctcattatagatcctatctgacctacatttggagatcaatcaacaatattcctttgaagtccccgtttgctccaaatacctcatcctagcaggcgacatcggccgtctggaagactacaacagctagcgtgccttcctacaaacctaaacatccaaattcgagatcgtattcttagcccttggaaaccacgaattctacgaaacaaccttcaacacaggcctcgaaaaagcaaaacagctcgaaaacgaaccctgcatgaatggccgccttgtactactccaccaacgtcgctacacatccgggactccgacgtgacaatcctaggctcacactctggtcccacatctcgcaggaatcaaacgaattagtcaattacaggatttccgatttccaaaagatcaaatattggtccgtcaagcaacacaacgaagctcactactccgacttgtcctggttaaggggtgagatcagagctcttcgggagagtacacaagaaaagcggtctgttctggtggccacgcatcatgcaccatccctgcagcgcacttcgagtccgcagcacgctgaaattcgtggaattgtgcttttggaacggatttgctggagttgccttgggatggagttaaggtttgggtgtttgggtataccaattatacgactcagtttagggagagggggattagggttgtgagtaaccagcggggttatgtgcttccttggaaaagtgaagaggggaagtttgatgttaggaggatggtatgggtacgattgaccgatagctacagaagcaagaagcacgagacttggacgaagatgaggcttaatggaacatggctcccgatatcaagccggacagacaaggcaaaaaactacaggtataacgtcacactgattctaccttagaatatcggatgcacctggcacagtattcagctgtccaaaaggagaattgaaagaaggcactactgttgcaagtctcatcgtctcactattgacggtagctacgctgaatacacccggcccaaccgcagatgctaaaggcatccggggattatataccacggcgtgggtctgtttcattcagaatatggggatatcagctattccgtggcttctcgtctgcggtagtaatactgcttcttaacgaactgttacagcttcgaaattggcttctatgctttgcgcaaccctaacccaaaccgcgctaggcctaacacggatagtatcgatacagggactgttacgtcgaaattacgtagtactatagtttcaaaactactttgtactcgtaagaaacaatggattgtcaaatgcagggttactagggagaatcgcagtgaattgtagacaaaatcagacaatgaaatacaatatagtgagaggaacccaattcgagaaaagcagaggaaggataaacggttcatgccttcatagcaagatgcgcagtttcccatcccagcagcgtattgtcatggaatatagtataaggatgagatgggcctaaaactcgttgttccttgagcacgcaggttcgaagcaaatcaattgctttagtatgctggcctgtagaattccacgtgaaggctaggttagccatgcccatcaacgtgttgggatggtccgcgccgagtttcgtcttgcgagtctccataacctgcagctggagctgctccgccttcttccatcggccctggctccataatgtcgacgctaggttggccatactcagtagcgtatcaggatggtccataccgagttttatcttgctcgtctccataacctgtagctggagctgctctgcctcctcccatcggccctgattccataatgtcgacgctaggttggccatacttagtagcgtatcgggatggtccgcgccgagttttatcttgcgagtctccataacctgtagctggagctgctctgcctcctcccatcggccctggttcctatatattgacgccaggttagccatgcccgtcagcgtgttgggatggtccgcgccgagtttcgtcttgctcgtctccatgacctgcagctggagctgctccgcttcctcccatcggccttggttctgtaatgtagacgccaggttattcatactcgccagcgtattgggatggtctgcgccgagtttcgtcttgcttatctccgtaacctgtagctggagctgctccgcttcctcccatcggccttggttctgtaatgtagacgccaggttattcatactcgccagcgtattgggatggtctgcgccgagtttcgtcttgcttatctccgtaacctgtagctggagctgctccgcttcctcccatcggccttggttctgtaatgtagacgccaggttattcatactcgccagcgtattgggatggtctatcgggatagtacgcgccgaatttcgtcttgctcgtctccatgacctgcagctggagctgctccgcctcttcccactgcccctctagttggtagacttctgctaacattgcagtgctatcaagggtatctttatcttcggcgccgctaatcttcattctttgcttccttgacatagctgccatatcctctgcaaccgaaatactgccacattccatcgcataccacgcccctttatagagtagcgtagcccagttccggagtgagtcttgcgatttcggtcgatgtgccacagctgacctaacatgtggaaacagtgaccggcatctctcccaattttcatattgaccggtcgggaattcaccacatagattcttgataaaacgttccttccactcctcctcctgaccatagtttttcaaccatatgtgtactgctagctgcacaagccgatgcattgtgaacaccatactatctttatctgaagtgataaaagaatagtctttgagaatcacaatatcgctctcaaaatcgtcatctacgtcaggttcagacgagtgatccgtatcctcatcacttgatctgttcccaatgtcttgcggagaacttaaaggattatgggttttgtcttgcacccgtagaagaccctctgggattccctgccggtcgaaaaagctcatcagagacagcaaatcagcggcagactgcctgatccgtcgaatatggtcgaacgaaatttgccaagtcagtaggatcgagttttttgcctcccagtctcgatcgatgtattttccctcgtgattaagaagtcttgcggcttgccgatcaccctgctgaagcttttctaggtattgcaataccgagcattggggtgcacggtgggtgatgtagctagcggcttgcacaatcgcgagtggcatgaattcgagttccttgactagccgaaccaattcctcagtctctgcaaaatcatctagcttcttccgcattagaaccagcgcctcggctgcattcataggttgtatatcgatcagatgtttctcatggccggcgagctctagagctacccctttattccggcttgtgacgatgatggaaccattcgagcttgcgaaaaggtaccttagcggtggctgcgttggggcatacctcgggggttctgcttgggcctctgtccgagtagtcaatggtttgcgaaggagctcatgatcatcgacattatccaggaccagaatccattttccgatcttgccatcttgcaaccagttcccgaagagttggaaaatattagagttgcgatcctgacgcccgggaatcttagcacggtcggcaaggttgcgcagactttcctcgcagcgcgcagcattactcgcgtgaacccagaaaacccaggtgtcaggcgattcctgtcggatttggtggcagtattcgatgacgagtcgagatttactgtcgcaaagttagacttgaacagaccgctcaggactatgttctcacccaacccctcctatgccaaagataactattctagatcccgggatcgaggatcttttgtggatttgagcgaggagttcattgcggctgacaaagtcgggatcatgctggaatggcaccgtccacagtggttccgggcgaggttctggttggtctaaggtttcgatggttaggtcaatttgctcttccaaaaaatgaaggtgattgattacctgggtgctggtggtagtgcgtcccaccatggtattcgctgttgttactattgtccacatatcctgcaaacacttttccaccggattctgcgttcacgccagaaatatgttgtgtaatggggactcttgacatggttgctctcgtcctgagcttcgtaccacgattgccaggcacagttaatccaaagaggctgatatgagcagatggtttttaagaaggaaaaagaatagagagatgaatttctagccaagtgtttgccaaagacttatataatcttatgccctctttgccgtggtctagccccggtaagcatttgatccgtttcgcgggggagaactgcattcttccctacttggctttctttcgagtcgatcaatttatacagaatcaaatttacttcaagccaataaaagtgtagcaccaaattattgtgatctaacttggttcctgtgatatggactatataaagttgatacgaaaccatcttgaccgaaaaccagcatgtccaggcaatgtatgccggttgtcctattattaggtcttctaccaatgatttgcagcgcatcccgcgctatacgaaaagctgcatctcgtatttcgttgtcacatcagctgcacttggctgaacgtgttgcattgcaattggtcgtcagtaatttgaaggctgatttcacccaggtgaagggggttggaatcaggtcgatcgtttgagcccattgtatgtatgttgcactcgtaaaaccattcgctgataggacaacgttcctaagatactagcagccataagccgcaatcaaatctagatcacttcagacgctcgtgccctacatccataataaattggcatattctcatgtcagaaacatctggcaggaaacaaattccctccatatataaaaaagcaaagcgcccaaatctcaagatctttttatactaaaacacctgcagccttacggtacttcacataccgtacaaatggcaacactcggtatagtcactggtggtatagggattgctagtgcgacaacacacagcatccacaaactgatccagactatcgatgctatcaaaagtgcaccaaccgagataactaatctcaagaatgagctattggccacggagcaggttctttcggggttggaagacgcaaaccagagctcgcagcttgaactccttcctttcaattccagacagactttgcagagaaccaatatactctgcaaagatgcctgtgacaagtttaaggacaaattagagagctggaccaagcgttcggatgatggcgtcagtatgcgagatcgctttgggtttggcattctccgtcaaaaatctgtcaagagtttatgtgaacagcttgaacgctgcaagtcaaatgttaacatggcagttggcttcgcaacaatgtacgtgtttccacatgtatgaaaaccaccacaaagcttgataggctaacaactttgaaagtacaactttggccttgcgttctaccactaacgcaatgcaaaacgacttccaagccagagaaaatgaaatctcccaacaaatagtcgagattgagcagcaaaatgcggtagtacagatggatctagatgactccacagaggtatcgcttccaaacgatcaggagcatactctacttgtcgaccaactcaactatcaacgtgctactctggaggcctctcaggaattcatgaaagatctgcttacgcaggctagtcaggtccggagaggacaaaggataactgatgtcgaaatgagcggaaaaggaaaggccctcgttggaagagtaggcttcgagaatgacgaaggcgatctttatcaggagattcacaacgtcaaagctacaactggtggcaagggaatagtaggggtggttaaaggattggacatcaatgcgtttttcaaagactagatgaagtgcgtttaggcctcgaagcccatcctcgtctgagtattctttgaaagagagaagtgaaagttcactaaattgaaggaagaagctctataagtcgggggcttgtaacttcatttctgtcttctttttattgtgctttttataccttaatccacaagctatccacccgccgcctctgtgagatagtcttcgtagatagacgccatctcctgcggcagaagcatgactatctttagagcgcacgtgtgcacaacaagaaagacgctattcgaattcaagatagaaaattgtcaaggagaggttgggattgatataatcaattcaacaacaacacaaactaagtacaacgatttgaagcaaacatttaaagtcacaaacaaaaacagaacatgggaaagatttcatcgcatctatcggccgtcacatcaaggttccagcttgctatattgaccctgaatcaatgaaaggctgacatggactcgccgatgatacatcatcatgtctcatatctatcatgaaggttatctctatataccagcgtttgtatctgccagtgaagctctaatttcacatttgaagggctcacccttgaaagttcccagaagcgcgtgaaaaacgtgctcaattaccacagacttccgttcgcggcatagacatactcagccagcaacccacccgagatggcaacgccggtcatccagaagccctgcgagaaccacgaccagcagctcgcggggtccttgagatcaacgaagaagaccatcgcgcctacggacaggaagcagccacccacggtgacggaaaagaaggccatgctcatgttggagtagtacccgcaagcaaagagacacgcactcatgccgaggaacaagacgaccaggaacagacgcgcgtagctctgcaggagaaccgcggtgctcttcacgccgactctcaggtcgtcctccagatcctggtgggcgtagaccgtgtcaaagatgatcacccacaaggacgaggccacgaacagggacagggtagatttgtcggcccacggctcgggcacacccatggccgcgcttccaatcatgataccccacgtcagacagaatcccagcaccacctgcgggaaatgggtgtgtcttttggcgaaggggtagtaagtagtgccgaagatgttgggcacagcagccagggcgatgctgctgggaagaagtaggaggaaagaagcagcgatggcggcctggatgcaggtgaagatgaaagcggcggtgagcgagatggctccacgggggatgggccgtgtgcaagtgcgcgcgaccagcttgtcaacgggagcatcaatgaggtcgttccaggcgtggctggcattgttgcagaagaagcttccacccagcagaatgagggagacacgcaggacttcttcgacggaagacttctggacgctagcagcgtggatcacgccgaagaaatgagggaagaagatgatgaagaaggcggccggggggctcagacgacagagctggatgtacgggacgaaatatgaagggagatagtccacccatcctccggcatgaacgccaccgtattgctttgacaacgagtccttagacttgccattggctgtgccattgagctgctctgggactcccatggtgaaagatagcaccccggtgaaagagatgcaaagagaaagctctacaaactcgggggaagactattattgaactcttgagagcaggaggggcccgggggagataagacacggtatatctctcaagttctcgacggccagctcgcactttgcggcaaaccgtacccacatggttgtgcaaaagcaatctccgatagccttgctagtgtaagatctatccggatgaagctatatatgggtctctgttgggctgtgcacagtatctgacaaacgagtaggatcctcatctctgaacccccggggccatttactaaactggatccactggtggacagctaagagtgctcaagtggtataagttcacaaatacgaagtatacagtcgtggggatccacacatgtgcattgatacatgaaattccaatacatgaagttccggacggtaccgaacggtattggtcttatacgaggcgtatggatctatctgcatgtcagattttaaccagattgatatcatggagttattgtctgttcttggagtttgacaaaagttgcaaaaatgacattgtcagagtttgcgttgctctccaaccctacagccatcaaggtcgtcattgtagcatgcattatcactgctgtgtactgggtgctccgaagggcatatccacgaccactctcgggcatcccgtataaccaccatgcgacccaaaccattatgggagacctggccgagctcggggagaggcagaaagacatccagggaatgcggccttggttcctcgagcaggcccatcgccataactcggccatcacccagctcttcctcggaccgttttcgaagcctgcaatcctgctctcggactaccgcgaggtcaatgacattctgagtcaccgtgatgcggttgatttcaagcgagggaagaaggtggatgtattcagtggtctcctacctcatgcacacccggctatggaaactttcgatccacgtttcagagagtctcgtgatctcgtccgagacttgatggcgccgtcgtttcttaataccgtaagagctcatgtctccccaaatcccttctcaaaagcccatactaaccttgggccggatgataggtgaatgcacctcatacctacgtggtggcctgcaacttgctggagctatggcgactcaaatcccgatccgccaacggacaccccttcgacgtcgtgaatgacatagtcgaattttccttcgactccatcctgagtgcggcaactggactgggcccagaaggaggagatatcaagcggcaactctcatacctgcgcgacatggaagaagccggaactgacatctccctgccggacagtatgaatgacgaagtgacggtattcccatccgcagggacatcggacaaactggctgccctcacactgaacgaagaatctctctggaagggcttctacatgccctggcctcgtctctaccacgccatcaacaacctgcggccctcggtccgacattcaagccagacgctgagaggatacattgaatcccaaatcaagagggccattccccgattgaccaaggacggaaagcccgaatgtgctcttgactatgtcatcgcgcgcgagatcaaagccgctgaaaaaaccggccgcaagccagtgctcgatgacccacggatccgcgatgagatctgcggatacctgatagccggccacgacacatcgaccgggtccctgatctggttgatgcgccgacttctctcccacccagaggaacagaccaagatccgggagaacctgcgagagacatacagcgcggcatgggcagagaaacgtctgccaacagcggcggaattaatcaaacacgctccctacctagacgccttcttagaagaggtgctgcgagtgaactgtcccgtcgtgacgatcatggttcagacgagaatggataccgccgtgttgggctacgctgtcccccgtgatacccaggtatttttgaacctcactggcccgtcgctgaatatgccgtccgtgtccgtcgacgagagcagtcgcagcaagacatcgcagatgcataagccggctcgccatgattgggatgaccttgatcccaaggcttttcttcctgaacgctggcttaagagggatgctgaggggaagttggtctttaatgcggccagtggtccaacccttgcttttagtgcagggaaccgaggatgctgggggaagcgtttgggacagttagaattgagagtcgttctcacgattcttatctggtcggcaaagtttgatgttcccgagaagctcgtttcatgggaaacgtacgattcattggtcacggcgccgaagcaatgtctgatgtctatgacggagatttagtagtggtatttgatgtaatttagacagtgttgatttccattctagactgactcttttctaatgttataaaatgcgcagaacttgaaatcttcaaagcttgaattctatgagggcgttccactagtccaaccaccgagagatgttaacaccatcccacagcggacacagccagttctccacattttccactccatgatcagagcaagacttctctgccatagcagcaatgtagggattaaattctaagccggtaactttgccatctaggccgactgcatggctccaggccagtgaaagaaagacccacgtatcgagaacaatgcggaaagtttctatgttgcagataaccacacgtggcgttgataggtcgagaaaagtctctcttagcttacacaggagtgaaacaacgatgcaagcacatgcacgtccgagcacattggggctattaagtggagtcttataagcctatgaggggctctcggagggagctacgggaactcgggagtcaatcgagttcgtatcgggaagatcttttgcccagaactattgtgggccgtcggagaacccgccaggcgccccatcggaaaaaccccagttttgcctggaagatacgggcagctcgcttacaccatttgtttgttctgatattggttacgtcgacacctggccaaccggggctttcaggttggtacccacttagcttgtttagctacagattcaggcggctggtttcttacatacggatacctccgttggaatgtcggttttacgattctgttttcgtgttgtattgcagtcacgatgtgagattcatggattagattgacaacgtgccggttctcggcagtgattgatggcgctgacatccgatatgggctgatggaagaatccttatgctattatgctattatctaaacttcaagttcatctgcggtcttctcttgacttaccacttctacatccagttcaggaacatagagacaaaacattgctataatggcaccctccgacgcagaccaaatggtgtactcggactccgacatccgggtccatgtgtgagtatcgacgctatcctgtttgtggctatctgtttgtgactcaactaatatgactgctctttccataggctgaaaaacgccgtgaccggacgcctcgtccaccatcctgatcgctcctttgccatcgaagtgactctcgacctggtaaagggggccgacttcttctgccacaaaccgcctatgcacttccatgtccaagaagaatatatcgaatgtactcaaggccatctgggcgtggagatcgacggcaaggaagtagtgctgacggcaggtgatggggcgtacagcatcaagccgtacaaagaccaccgctcgtaccctctttccctagatcgacaagaaaaaggaaacacggtggtcaagttcctactatcgggcgagaagaccgacagtgtctttgagctgaacccggttttcttcgagaattggtaccgctatcaggatgatgtggtggtcaacggggccaagattgacctgattcagcttttcagcgtatgtcccccctcctccttcctactcctatcctcttcaatgcttgatttctcatgaatacagacatttgacgcgggtggcacgtacatctctctcccctggtggattccttttggacagaccgtctcacgcaccatgggcctcgtcgttggaagatggctgggcggactactgggttatcagcctttctacaggaagtggacttcggattggcctctggcttgccagaagatggaatcttcattttttcaacggcgatttgccgatcgctcgaagatggattgataaagcgattgataaagcaatttataaagtaattgatacatatcattcactcgtttgtgaaatagccgtcctagaactagactcaagacttcaatctcaatgcaaaatagccgatcatatcatccaagaaccgtctcaaaactagactcgacaatttaaaaaggcaaaatacccgaccctccaatctaaaatttattctgaaatagtcttgagaatctcatccacattcgcaaaggcgagctcttcgctggtctctttccagagctgctctgagatcttcttcccctcttcgctgtagataatcggtgccaaactgtaaagtatcttagcaatagctctaatcatggtcaacatagggataacttacggcaccaatttctggaaggacaggaactcgccatgggtctcctcgccatggttgacagctgcatcggtgaccattcgggctccaacagcagcagtgttggccatgcggcgcattacgatcttggcgatagctccggcgaaagtcttatcgtgctcacggttgaattcggaatcgaagacagagcccggcgaggtggcattgatgatggcaacggaaggcgggacaaccgaggccagatgtgccaggaaaaactgccctagaagcttagagaccatcatgcgatcgagggggtcaaccttggtcttcttctggtcgagcgctgccagcagcgggaagcttttcttctccttgaagggagtccatgcggcgacctctgatgagacgatcgtaatgcggctcggacctccttgggcagcgcgtttttccttgacgacagggagcaggaggattgccagcagggcggtggagaggtagttcacctggatcatctcatcatggcctgtcttggcgttgaagacgcgcgtggcgttggcaatgccgatattcaggacgacaatgtctagtcgggggaggctcttggtgcgctccgcaaaggcgacgacagagtcatagtcggactggtcaagcttccagacctcgatgctatcgtcggagagatcccggccagcggctagatcctttttagccgcctggcctttctcgtcactgcgcacagcgagaatgagcttgctgagtcccaggtcgaggagctggcgactggtctccaggccgacgccgatgttggatccggtcaccagggcggtcttgccctccaggctgactcccttgaccggggcgggtttcacggtaatctggttgtagaagaagcgaggcaggctggcctgcttttccggagtcacatcgaatttggaccccatttcagcgaattgaaagcggggtatcagctttggaaagtttggacgcaaggtgtgctggggaaaaaaggtgcccaggtggcgtgttttgcctcaggcacgtccttatcgatagaaagatttgtggtgagaaataggcatctgtgaggggtgttgaagagttactgtaatttgtgagagttgaatgaaagaaagtgagagttggttccaaggctgagagtctgggcccagtctcgaatgattgtaggatcgatctaccctaagccaaaaaaggaaagcatttacttgtatagattagactagtccgtattctgtatgaagccaggctatcgattgatatacgtggtcgcatgtccaacgtgctcaaatatgtgggtcacccgcgaaccatagcagcccgggaggcacccggccccgggggggagaagggggatcagcagaaggccggtgggaggaaaagtagaaatccgtatggacccgctgtaattaattaattttatttgcttatttgctgtatcgtactgtaattcatttatctgatctcttagtgctgatggcccccggggcggtgcataaagtgagtctatcttcgggaatttagtcctcggatgcgtgattgggaacaagctatgggcagagctactgtccaatgcgcatcgtaagattggatggcgccaagtataaaacagattggtctcccaagccatatctcaccacggcagccatttcaggtacctacagagatcatgcagctactgggtttcctgatcggggcgcttgcagcgggagctcaagcagcctccacgagcaatgtgaccaaattcacttcctttgcgcagaacctcgggctgtccgcagccaatacacgtgctttggcagcgcgatatgcaaaggctgacgactcggttgctatcttgaacgttgcatgtttgactgcgcagggtgtgcttggcgctgcaaatgttgatacatcgcctctcaaccaaactattgtggatgtaaactggtaggttgctatttatcggacctttgtatgttcgagctttttactgaccaatcaatgaaggtccgaatcgtgttttgcagagccgcactgcatcattcagcccgaggtagcccaggacgtttctacggcggtgaaagtcataggtttcttccaggtgaaattcgcagtgcgcagtggcggacattcgccgaacccaggatggtccagcattgggagccaaggtattctgatcgatttgtctaaactaagctctgtcagcctgtccagtgatggcaaggtagcgagtgtcggtccgggtcttcgctggggcgaggtcacggaggcattgaacccagagaaggccgtggtgctggggggaagactgccctcggtgggagtcggtggtcttattctcggaggtaagtaaaggtgtctattcatggacccaaagatgcagtctaatcaggagttacaggagggtatcatcacctctctactcgctatggcctagcggcggacaatgtgcataatttcgaggttgttctgtcaaatggaacaattgttgacgcgaatgcggagcagaacaacgatctattccgtgctctcaagggaggtggccccaacttcggcatcgtttctcgttacgatctaaacactgttccggtctatgaagtctgggcggaaatgaggtattattccaccgatcaagctcccgccgttctggatgcctttactgagtggcagctcaacggagcctcggatgtcaaatcggtcgtggctattgatatctctttgacctctatagtcattgggcttgtttactccgagccggccgtcaagcctagcgcatttgcaccattttatgatctggagccactatctattccggtccccggaatgaacaccacgtttgtcgttatcgatgaactcctggcatccgcatttcccactgcgaaggctcggtaagtaattcatcaaatcccgctccctcttcagacagaactaatgccttcccagacacgactatcgcggctgcagtacccgcatcaacgccaacttgacccgggatgtctacgactactgggtggagaaggcccaagcggcttaccaggccactggtgtcaaccaaaccttcgctctgcaatacgtgggagagaatctcatccagaaagggattgagaatggtggaaatgccctgaatatcccatctggcccccagcaatgtaagactcacacttctcatctgatacgaaaccgtcctaatgtcagctacagggtggaccactattgtggactgggaaaatgaggctgatgacgaggccgcgcgatccgtttccattgagacgacaaagtactggaagaaactggccaaggagcgtgggttggatgtgtccttgacgtacatgaacgacgcctcccgcgaccagaatcccctggaatcctacggggcgacaagtctaaagcagctgaaggcaacttccaagaaatacgaccctacgcagatgctccaaaggttgcagaacaacgggttcctgctttcgaaggcgtagggaattccagccccggggtccgcctctgtctgcactactgtataggtctcattaaagcgaatttattgggtgtacatggaatattaaaaccatatctactagaaaaccaacaaccaatcgcttcaaatgttttcaatttcccttggatacttcaatattccgaaattctgcctattgggtacgtaatagttccaaggttgccacggacaatcctaatattcatgcacgagcgagacaatctatagattccagagcactgactacacgaactagttcatatagtacttcaggtctttctcagcgaaaaggatcgtactatggtgccccgatcaatatatcagcctcaagcctgtgcctttcattggctctgccccctatcagcgtacttattgcgtgctactagtacccatttctttgcataaacttggaagtatatccatttgcacgcatgaagtagtggtaatatagataggtacggagtgaggcttcaggtattattacatacgagtactttttaataccactgtatattacacacaaccagtttacaatacatccgtggggcaaatgtgataggtcagcgggtagatctggaaaagatgcggcccctgaggcatccagtagatcttgcttaatcgaatgttggccccacgaggtaacccaaggctaatctaggccaaccgtggctgagaccttggaactgagatgcattccttcgcaatccttgcaatctatgtttcaatttcgcgaaccggttttatcagggaactgcggcgggtggatacatcctagcgttgcaatgatgataataggtacctacaacataagcagtaggagtaatcacggcaatacgatacccttgcattgccggtgtatctgtaaaggagttttcccgggcaaagtccgcgagtgtgataatgatagcgcactatgcagatacgatgttagcatcgacggtcttcatagtaaatgaggattgattctttggacttttttcggcattccctcaatcttgaaagtgctttctttgccttgtccattatggactctctacatgtgcttgctgcgaatgcggcagagcggccgactatccttgttgctctggtcttggtctttctggtattggggctgaagctatctccccggggaaagcagccgccatatcttagagagagaataccatatgtcaccaacactattcaatatttgacagacgtgggaacgtttttggatcgagtgacgtaggttttatatcatttttattttctaagaattatctaacaacattaagaacaactctggacaagaccaaaagcaacattgtcaagttccatgtcggtccgataccagcatacattgtcaccggcacgaagaatgtgcaaacagtatttagttccccgaacatcctagatggcaacttcctccagcttatgttgatggagcgccactggggaatgtccaaggaagaaatcgccaagtttgcaaacgacaaatccggtcgactgaaggccccagccccaggaactgagaataccccagctgagaagagattctggcgcggtcacgaccacctgtacgctgagtacctcagtaaccgcacgtatgcggatgccctcgccgattcattctactctctgttctcggagcgtctggataagcaatcgacgacggaatggagcaccgtcaatcttttcgagatgctgaagacctcgatggctgaaagtgccattatctcgctgtttggctcagagatcatcgatctaaaccctggtttcattgactgttactgggagtttgatgaaattgccggcacgcttgtctgggggcttcccaagttcctgcagcgacggtcggtagcgataaaagatcgtctacatacgatgaccaggaagcacatcgattccgcatgggaacactttgactggaacgggcccgatgctgagtccaagtgggaaccccattttggatctcgtttgtcccgggagacagcaaagtggctgtctgaagggggtttctcgaaccaggcggccgctggacatacgctggcttcgttatttgggtgagctcttcgtgatacttgtacatgatatttgaaaaactgcgctaacgtttatcaggctcaacgggaacacagtccccgttactacatgggcgatgatcgagctgatcaaggaccgaactctgtttgaggctgtgcgcacagaagccatggaagcctatatcacggatactaacaccggagccaagcggatagacgcacaaaagctcatcaatcttcctctgctgcagtctctctacattgagattatgcgtctgcatgtatctttcaacgtgacgcgcaaggtgatgcagcccatccaggtagacggatacatgatcgagaaaggggccttgttacagacctgctcacagattgcacactacgaggacgctgtctgggccacctcggagcatcccgcctcggaattttgggcctggcgacatgtacaatatgtagattcgcgagatgactcaactggggagaccactcgccaggctcaatttgccatgaaggggagaccaagctcgttcttcccatacggtatgtttctccttctatcctacgacgccgatactgactggcttatcccaggtggtggatatgtgatgtgcccagggcggcattttgccaagcaggagattatactggccattgcagttttggtgacgaaatttgacattgagtttgatgaatggctggactctactgggaaatcctcggacaggccggctcaggatgattccagatttgctggcttcatcgctatgtctccggatcgggagatgagaatgcggtggaaaagacggtggtagtatctccactaaacaagatcgaaagatctccagggcttcaattcattccaaggttgaatatattgaatatcattgaaacccattttaagaacacacatgtgcatgcaagttatgcatacagcaaaatgaactttttcctgctccaattgtatgtcagaccgctggcgatcggggacgaatgtctctccagtgcgatacaattgtgattgtgaccgagaaaatcactccagaagacatccggcatcaagcgagtctgtgggagctctcttatgctgatagactcactatcctggattcacgtgaaaggagccgatgctccgatgccgtcgcgtttgagcccctgcatggtctgattttggaccatcttctggactgcgcagaaaaaggaatatcgactattctcggcatcgcacatcgcacatcgcacatcgcacctcggtgcgttctagaagctgagcctgcaatacccactgcaggtccttgataccacaccgttcgacctgttggctcacgcgcggcgcaattttgccaaggccccgaccatgcgtgagtctctgtgcgaaggcgtacgctcgatgtcggttgatggctacaccgaaggaaacattgacgaggctgtcgcatctgctctcctcatggatgcgtatccctcaagatcgatcccccctcgttgaacatgctactgacttctcaggattctccccggcagtcttgataaaaaagctctatggggagtggtggtctgcagagcgagaaggcaagggcattggccgctacgaacgcgcattgtcgcggttcaagcagtattttgcgcagctatgccagagatcatcgtcgagcattcgaaggccacgctcaaccgcctctatagccaagacgatgagaatgcgctgcggtcctctgttgtttgttttgtttgtctgagccgccttgtgtgacacgtgtgtcgtgatctttggacacgtgatctttggacaacccagccagctcgggctctaccatgtcgacgtccatgttaccacgacaaccagaatgaagaatcgcatgtcccaactccgggcccttgcaattgggaaagtatatgttgtagaatatccctccggatcataagttcgacgccgttctgaaacttattggcgacagcactgttgttgattcaccccagatggcgcgcggaggaggaccgggttattggtggatttccgcctattccgaacttcgatcctctttcgcagatggcgtgtggggttcacttcagcttctttgggagatttgtttgggaacccctgagtctcctttgctacccccttaagttggatactagcggcatggctatgaatgtgggctcaatagaatgaaccggatgtcaatatttccgaacatgtctcacgccaagcgactagtgaaaatgattgaagtgaataatttttgattacttttcgagtctagcctttctcgattgaatattcatggtcagctatattgtagtcaattactccgtatagctcctcgtaggtaccttggatctcgattagacttgccagaaccgaagtttaaccgcaggagactgaacttcgccctggatcagatccgtggaattcgacatggccacgcgtacgtacctggggatgacgcggtcgcccggccatggacaagttttaagcttagatcttggatatatgggaataaaccttagccgacggcatcaaactcaaaaaaagttaatgtccttctcgtccatgactggtccttttgaggacatgaggtactccgtaacccttaattcggaaggctgaattaaactacacatgctaggctatggggaatgacccatttcccttcacgctctatctcgaacctagtctgagctgcgccttgtgccggtgttagatgatgacgactgagtatccacgcctatcctcgattcccggtcaggtttcatggtttgattgcaggcaacgcaacggcttaaagcatgatctgcgctttagttactagaaactggagccgttatgtagagtacctgaagatcttataagtatagcctctggtctttccattttattttcttgacacttatttttccattttatatctattcatttgatatacctcgacatgcgcgtctccttgggcgctgctgcagccctggcagcatcagcaggtgctacttcccttgctgatgtctgtaccgtctcgaatgtgcaggctgccctgccctccaacgggactctagtgggtatcagcatgatcccctctgctgtgacggccagtgctgtctacaatgccaccgctggcacgggaagcaccgagacttatacctactgcaatgtgaccgtcacctacgagcacaccggcaagggagactccgttgtcatcaagtatgccttccccaagccctccgatttcaagaagcgcttctacgtcgccggcggcggtggcttctctctgtccagcgatgcaaccggtggtctcgagtacggtgctgtcagcggtgccaccagcgcaggctatgatgccttcaactacgcctacgacgacatcgtcctctacggcaacgggagcatcaactgggacgcaacctacatgttcggataccaagccttgggcgagatgaccaagatcggaaaagtcctgacccagggcttctatggcatgtcttcctccgccaaggtctacacctactacgaaggctgctccgacggcggccgcgagggcatgagccaagtccagcgctacggagaggaatacgacggagccatcaccggagccccggccttccgtttcgcccagcagcaagtccaccacgtcttccccgctacagccgagcaaaccctcgactactaccctcctccctgcgagctggcgaagatagtcaacgccacaatcaccgcctgcgatcccctcgacggccgcaccgacggcgtcatctcccgcaccgacctctgcaagctcaaattcaacctgacctccatcatcggcgaggaatactactgcgccgccgaaaccagcacctccctaggcttcggcttcagcaagcgcgccgacggcaccagcacctccaccacccccgaacaaagcggcaacgtcaccgccgagggcgtgaaagtcgcacaagccgtctacgacggcctgcacaactcccaaggcgagcgcgcctacctatcctggcaaatcggctccgagctcagcgacgccgacacgcaatggaacaacgaatccagcaagtgggagatcgacatcccctcgacaggcggcgagtacgtgaccaagttcatccagctcctcgacctcgacaacctctcggacctcgacaacgtcacctacgacaccctcgtcgagtggatgaacatcggcatggtccgctacctggacagtctgcaaaccaccctaccggatctcacgccgttccaagcctccggcggaaaactgctgcactaccacggcgaatcggaccccagtatccctgctgcgtcgtctgtgcattactggcagtcggtgcgcgccatcatgtacccgaatctgtcgtcccaggagagtctgaaggaactcgccgattggtaccaattctaccttatccctggtgcggcgcactgcggtacgaattctctccagccgggtccgtacccggagaataatatgcagactatgatcgactgggtggagaatggtgttaagccttcgcggttgaatgccactgtttcgtcgggtacttatgagggcgagacgcagatgctttgccagtggccgacccgtccgctctggaagagtaatagcactttcaagtgtgttgatgatacggcttcgattgagagctggacttattctttcccggctttcaagctgcctgtgtactaggttgtatgtacaagggagctttgagtatgccaaggatgtttctctcgcttgaggtattttgggtttgagatgatcagccctagttcagccctagaagtctgttttgaccaattgggcattatactctagttaattatattctgtgaatgcctattatttctatcatctgcttcgtcttatagttagtgtggtcttgatcattaagcaaagggttgagcactgcctcaatggtgtcccgtcaggggtcagtttttgaatgaatattattagacccattgcacaacattatgcctaataacttctcggattgcaagtaaaggtatgaaaaacatgcaataaaattagtctaagaacgcgcccacaatatgggctattccgatttgtttgagaattttctaattttaaaagattttttttctataaacaacgacatatctagaaagaaatgatttgtgctttgtaatttgtgctttgcaatttgttcagcatgaaaactccccataaccaaaaggtatatccaacttaaacaccaagaatcagaacccgagccacactctaacccagagtcagagtgtaagcggcatcgagactgcaagccagggtattgacatcatcaggttgctggtaggattcaacgcagtcggcatcacccgcagcgcaggtagcggtggtgcaggactcatcactgatggtgactccgaatccagcagtgacgaaagtcgaggtcttgaccaggttgatggaggacaaatcccagaagaggatgtcaccggactgggtgtactcgaactgcaggacgtcgtcgcagacctcggtggtggacatcttgatggagataccgccgccgttggagttggtgagccaggtgtcgctgaaggactcgccgggggcgacggtctgcatctcaccggggtcctcggtgacaacccacaggtagacggtgtcctcgaggttgttgacaatggtgacaccgctgccggtggcggtggcggtggcggtgctggccgaggcggtggagctggcataaatgctggtgctagtgggcacggagacagggacgctggtcacggtagagataacgggagtcaaagtcgagtaggcgacgacggaagtggaggaggcactggcgacctcttcgacagcgacggcagtagccacgctgacggtgctgccggtctggtagacggtttcgtagacggtctgccagacggtctcctcgatgtagttgtcgtcggcgacggcaatggggcgggcggaggcagtcagtgccagaagggccgagagggcggcaatgttgaagcgcatattggctggatgaattcgatattcaaaggaaggtgtttgatagacagtgagatctgggtgaaagagggactttgatctgatctacagactgttaaagagagtgatgtgatgaggctcagccccaagaggtaggaatccaaaggagtgtgattcgaaagatcgtgatggtcaaaggagagaaagaaaaaaagaggagaagacggaggatatagcgccattttattcttaggggtggagtacgtacgagggcattgggcgtgtcagattttcagtgtggcggccgtttgataggccacccccattgaaccgccaaattgggtttggccgtgttgtttccatgtggtcggtgcctgactagacgagaccgtcctgttgatcccattggtagccattgctggggtcaggcacagcgatctggtccgaccaacccgaatgaagacggccagcgaggttccatggatgggccagttcctgagccacgatttcgccggcgctggtcttggggattgtgacttgttccttagcctggactgtggagatacgcgccaggtctagatcgaatcagagtagacagcgcctgcggacggaaagttctcaattgcgcggacctgcccctgaatatctttttttaatgcctacaatctagatcactataagtgactctggcattgtccgggccaagagggacttaatacaagcttatattttagaccgaaacggggtgggaaggagagtagattatcgccggagtcttctttgtcctccgttggtgccagcatggccagactgtggatccaaattgagtcactccatggtttgattaacttttctctcgggtaccctacggggtacatacatgatcaggcacaggcacatacatcgggaatcgcaccctctggacgccacttcggtacatccagacgggttcctggaaaactctgcatcctgccaagccgtgataggtggcaatctatacaccacacacatcttgaatcggtaccggtcaaatgcactagaatcccctatacatccatggacgtggccattgacccgccaagccacaaccccgctcacaaacccactccgaaaaattgctatgttgtacatggcgtaacagtgttcagggtgtggccccgtaggctacatcattggggaagacgtgggtttttcgggcagccgacgtattggaaacacgaccgtcggcgacaaatccgtggttctcaggccccgtactgcctgccaacggacctccccggctgtacgtctcgagcgcattaaacacataaccgaagacttggcggtcaacgtccgaggcccacaaaaagtctagatgctcgtaggtgggaatcgcctgggcgacagtgtcatgtggcagcccctttaacatcacgccgatatcaacgaggctatcgttgtcgccgtacagcagcacaatgggggttttgatgttgcgagtagggtatttgaccggcttgtaaaagcgctcgctggcggcgacgctgaacggggcatagagttcatcgtcgtagaactggaaattcttgttccgaatgatctggaaccaatgcaccacagacttggtgctggtgaaggagtatagatgcaaatacgcagcaagcttttgtgtttggctgatgttgcggcatttccagttgaagagggcttggagcgctgtgtcgataatgcgcacgaagatcggcgggtacagtatcgtctgccacatagttgtcgaggaaagaatgctgcgtcgaccgaacaacaggaacaaaaagtccggagaggctttcataagtgaatcaacaatgcggttgcggaggcccgaaggagccatggccggcgcaagtgccacaaacacatcaatcttctggttgagcaatggatgaatagcgagcgtagcgaatgcctgcgctgtcccctgggagaatccaatataggacaatgacggctgatcggtcacctcgaggatgtactcgatgctgttggggatatcagagaaggcgaactgatcgatagagaaatcccaaaactcattggaactcggcgagcatcggatcgacttcttggagtatttatttccacggttattccccagccatacatcgtatcccctttccaccagctggaagggcaggcaccgttgctcgtctgtcaaggctacccacacctcactggacatcatcaggccgtggtggaggtagacgacttttttccgaagcccattgggaccattattgacgcgcattttctcttctccttttcgatatgctaaccgatgaagtccaagaaggtagccatcgcttgtttgtacaatgtgctcctcggcttgaaatccgaagagtgcacatatctcggtgaaatctgacgcgtctgcaatagtggtggcaaatatctcctctttggtgcgcttcagccgggattcacctggtattaaaaggttgaaaagcgccttggattggccatagcagaatgtgatgatagggccagctggttaggggttaatattggtatcatccatattcggtgattttactaacgaaggcaccaagtaatcaagtgaatgattgtctcaagcagaacaagaaccaaagaccccaagagggctatatactcatacctagacgtgaaggtcagttgctgcgttcttcataaaagctagagttccttaccagaacaatctcccgatgaacggaactcgcgacatgatgagcaacaattgttatgcatatgtgcaggtgcacttggatactctatactcaagacaagaaagacagagatgctgcaacgttacgtttaaaagcgcaaacaaacgatgaatgcccccgacgtcattaccaacatgtgatagcgatgcttatctcatccggggattcgatctatcaaccaatcagcgtcgagataactaacggcctaaatttgccgtacggtctcgttcctcgctctcttgctacttgtggttgcgcattcgtccacaaggtcgcgtcaacatgcccagctcatgcaatgatatccgtacgttacatctccatgtcgcacaacgttcaaggaagggtcatgttcctggccccgctggactctctaccgcgaccctccgttgccataatgcaaactgaccacaatcgattatctagggcgggccctggctcaatgcctccaggagtctgactgcatcatggtccagcgtcatactccccgtgaatgtctcagctctcctctcgccgaggagttacccgtgaaatgtcagcagttgcggaaaggattcagcgagtgcaagtgagtcaggaaccgggccgaccattatggacaaaccggacaccctcgctaattattgccctttctcggaacaggcgcggtctgatcgatatgcgcaagcgcttccgcggcaaccagcctatctcggtatccaaggaaatggacggcgggcaatctacctctgggggacagctatatgccggagcgcccgcgtaccaaacggtcaaggaactcagcggagacgaagtgcagatggatccagagaagacaaggggcctgtaaaaagggtatttggattcgctgattacatactggcatggcccggagttcggttacgcttaaaacatacatttcctctctgatactcacattctcattcaagatcgactgagcttcttatacccaatcgattatatatcacaccttcactatctctcgcagaacatccaccagacggtcgggcatactcaggaacggggaatgcgaactcggcaggcggtaggtagtgcccggcgcatccattttcgaggcgaagaactcctggagtgctggcggcaaggcctgatactgctcgcagatgatgtaggagcaggggacatcgtgccacggctcataagtgacttcgcccgagaagaccgcacgtgaggtgtgcgctgtcgtgcgattccattttttgcgctgctcgacggtcaggtcctgccagccaacgttgtcgatgccgtcgacgtgaacgtagtcgtcctttttcttggtcaacttgatcttgacaatattaccgttcatatgatgcatggaccaacctcgactttcatccagggtaaataggctcatcccagcatgtccagcaggctctgtcctttttccagcgcaaaggcagccaggtaaacaaccctcacaatgcctccaggcttgtcactctccgcacgaacatgctccactagaccctcgctagctgtggaggctacaaaaccccgtaggagtgtgccgcaacaacaatgtcctttccctcgtatgctagagtcgttaacactctacgcagcgagacaacgtcgtcttctaatgtcagggaaggcggctcagcgccgatagaggggggcgggaggcattcagaaggataagtagggtgtttagacggtcacgcacggcatcgaagacgatgggactaacccaagcaccgattgagaagacgaaagtcggtctatccatttccatttccagtttatgtacaggagggcaacagcgttcgatgggaaagaagatatgaaaatccaggctattctccagtccttgagccgttatacagaagcgaggagcattactactgcttcgggcaagctagtatcctcatgagacttgtttaggatggactgaatggcccgctgtggatattagggaccaacgacagtcaaaccggcttcaagaggaatatgaaacatgtagttagtcaatctcacccgtttcctgtattctttaggctaattcacgtcctatcagactcctgccctcttttcatgcaagaggccaattgcggtcattagtgtcgttttagcggacatctaccgtttcacggggttgatatagcctggactctacatgtaaagcttgacagctgtaggcttccaactgcagggaggtggaaggaaaaggaaggcaaggagaatatctatcattgagaattggtcatctttggacctaatgtgttcattcgggagatcaggatcatgcaagaaaattgaaatcatggacagtccaataaatataaatctactgagtcttcttgagcttatcggccacaggggcagagtagagccagacaaccacgaaagccaagaatcctccaattaccgaccaaagaccggcaatccatacccagccgccggtaatagcccagctgcgcgggtactcgtcgtgcgcgaagtggcggttggtaacctcaagcttctcctcgatggcggtcaagaagggacgcttgtagttgacgcggaaggagaagattccgtgttgatcgggagtcacgaactgagtgctgaacacagtgctggaatcggtgcgctcgaccggttccaggttcaggcggtggaagggcgagagcatggtgaactcgagctggagcgcgtcgtctccaggtagttcaaagggaacccacttatcgtagacatactcggaaatctcaatgctgtagatctgcaggcaaataaggctcatgttagcttggaagagaatgacaatatattgtttcacgtacagtctcgttcttgatccggtagatcgaggggttcaactctgcgccctcagtgataaggcgatgctcgaccttgtcaaccttcaggacaccagtctccttgaaagcccaagcagtcaactgcttggcgaactcgcggttcacggtaggtgtcttcttgccgctgggcgtcttgacggaggccgagaaccacttgtcctccagcgactccactgatccgagaacagtgaagcgggcagagttacgtgcctgcatagcggaaatgatattcagctgcgacccggtagccaggatatcctccggcgcgggcgtgccctccttggggttgtagctgtaggcagtggcgggggccttgagaatcggagagagcagggcgctgtcaccgagagtctggggagcaactcgagggagagcaagaacaccctcaccatcaaagaaggccttgacgtcagaacggaggggtccagggcgctgcaggacaagaacgtcatgcttctcagcggccgagagggtgtcatagttgaagtggtcgacaacaacttgtgagcgatcgttggataggtgaatatcgagttcgaggagaagggagctgatggcgctggaggtggcagacttgccagaaagggcgaggaggatgtttccatccttgttcataaagtcgacgatgtgtttgggggtcaaggaggggccgaggcctgtattcttaggtcaattgactagacatcgaatcaatagtcgggtttgcgcaccttttgacttgggagggaagattagaaggtggtcgtaagctctttcgccaagcttgaacaaggcaagctgttcactcttggaagattcgattgagacatcgtatcctcgtgctggagtccgagagttagcaaaggatcaataaattgagtcagattaattaccttctaggtctgcccacaacgtggagtacaggtccttttgttctgtatcttccaaaatagccaacaggcgactgccggagctactcagcgcatttaccgcagccaagaagcaacaaataagcaacgcaagacaccacctcattttgaacaaatcccgcgcagcggagcggaaggatcaaaaagaaggaagtgaagaaaggtggttgaagatccaagttgtatacatagaaagggcgacgtgtttaatgggcgagtgccaagacccgagagcgctgggcccgcatctccgaacttcgacttcacctcgtccctccagcttcaattttgcttctctgatcctaaccactcaacaaccactcagtgggaccggtgtatctgttcgttcgtgcgcgcttgagcagtttttttctattctaccggcattgccctcccacccacatcgcaaaaccccgaccggtcgccaacgacctcctcctacagccatgtctgcccctctgttctggtcgacccccctccgctatatccgctgggctgcgcacgagaagccagctatcctcgccgctctgtgcattggcgtcatgggccccatctcgctggctactattcctcccatccgccacgccctcggtgacgtcgaccccgagcctattcctctgacatatcccagtatgaacccattcacttccaccaaatcggtgcataagtacaaaacccatattgagtaatttgaatctgaccattatcttcactacgtacagttccgcagggtccgcgggtgatccccaagggctacgatgacgaataaacgggttcggaactacgaaaatgtcaagttagagagaatttcgtgtattgtccgagctttggaggaataaattcagcggatggcgggagatgagttggctgtgccactggactgatgaacaagtcccatcgcatcagtgtgggcaatcgaatcgacttgttccgggcaacttctcctggccatcaacatgctttgataccaatatttgttgcgcatacgccgaaggtcgagctcggcgctacagtgtatgtactatgttttgtgcaataatcgacatcaagtcgctttctaggtttcaagtatggggtatcttaggaataattgcattcttgcgcacgaacagccgatatggtttccccaccaaggagagaggctgctcgccagaattagtatctgtaatacccgatcaattgcagaatttgcatcatactccgaagctgcagcatcaggtcggacaaaaaagccagcaatccaaggctgtacacaaggaagtaaccatcacaaattaatccctttcccgccttttccgccgtgtacccaaggagaagatacataaaaaatacacctaataatataaaaagactactgaaaagactaccaaaatgacaagaccgcataagcggcctactattcttgtttagatgacatcttgattactccgaggtaacagtatgcagagaaagagattcattaagatcatggagtcaatccaagaactcgcacatcaaaacgtcaatcacagaaggaccaacgccgcaaatgctcatatctacatgtaggtcaccggccttagtttatccaagcacatcgctttcgcaaaccaaggggaaaaaaaaaaaaatagaacgatgactccccttctttcaagggaaagacaaacaaaaagaaaagttgctaagaacacacaaatccctatacaccgttaaaccaacgaaaagtatcacattattgtggggtgggtattcccggaatccgtgagagcagagaaacaaacaaaacgctcaagtccgggccaccttttcgtaaacgcaatcaagacacatcactcttactcctggctggccagttgcagaaaagcatgagagaaatcaagaaggtccacgggaagtccaagctcctgccacggagcaatgggttcaattccagtgaagtccatggtataaaaaataaagtgagattcatatccaacgggaggtggaaagttcccctgactggagacaaattgggaatatgagaatggtggccaagagagagaagaaaggcgtgaagattgtccaggagattttcacagacatcaacattattcctaggggtattttggagatatcccggaagaaagcatcaagtagaccacagtgtgggtggagagaagggagaaatcatgcaggaaaacccttggggtggtcattcttgttcaccgccgacggtgggggttgtctctggttgcttgtggcctgcgctcatattccggagtgtatctgggctccattcctatccggggatccggggcagttgtggtaggataggacatcccagacgttacagtagagtactcctgttcggcatcatatccaggtcccgagtatcgtggagcattgcttcggccattgtcgtaaccatagcccgtgggggcatatgtatacgattgagggtgcatgtccgcagacgtcacaatgggctggttggaaccagagtaggaaacctggggcggggggtacggagctgtacctgatgcatatggcgagtgagtggcggatgtgtaggatggagggttggagtaaggggtattctgggatccactgtaggactgggagtagggatccatgtattgctgaacgggtgctgcggtaaagggcgtgggggacgggccctgtgactggcgagtctcatgaacaggcgcaggagcatagttcactggagcggtgttaggtgcatgggaaacgttcgtgtcttgaatgtaattcccacgcgggtagcctaggtcagcccgacgtgagacgtccgcctcccagcgagcggagtcagccttcagatcagtaatcatctcctgtattcgatgtgtggttagaatgccatcttcacttctcccgcttgctgtcgcttgtccatagtcacttacagaggtgagattccgataggcgcggataaagaatcctgggcggccctgttcatggtcagtcaaaacggccattggggtcatcgggggcacgagcggaggacgcacattgtggttgccaggtctcacgagggcatcgtttccaaggtagcggcaaatatctgcttgaataacttctcggctgattccttcaccggggatgaaatattcattctgacgctccgggcgtccttcatagcggcctgtcataatgtattccgagggaggaatatccggtttaaaaatttaaagtcctcggatccaaagggccagagaagagggagtccggagtctggaagatggtttgagagtcccgggaaagttgatggatggtggtgagtccgtttttattgtaggatgtacaaattctatcgagcaggttccagagccgacaatcaacgacttgaatggtttcttttctcgcttccagggcaagcagaaaacgagatatgatccttgggaagtggccagaaaaaaattgatcctggtcgcgaataacagtccgtgggaaagtccggttaatcctgggaagaaatcctggttgtccactggtagcaattatcctgggaaattgagaaggcctcaaaaaagacggtgatagcgacacgaggttgggaagggagaggatgggttgtcagggtcaattaggagaaagagaaacacggctgacggggtcctgggatatctgtaatctgttcggggcgaactagatattgggagaaagaatagttgtggcaagagaagccaggggaatatggggagaagggagagaaagacgagggagagggagagaaggggaagaaagaagagggggggaaggtaaagtggacatcaaagggccagggcggttgggccgtcttgggctggtgccacgactccccactgagatcaaggcaaaaagcatgcaaggtcaaatgtggattagactaatgtgcaaccctatgtctatagccgcttgagtattttaattggtatcatttatatcatttggggccagggagataggactttgtacccggtttcatataaacatgtatctataactatatacttccctgatcaacacccccgaaagtgtgaatgtacacagctatacggagtggatccctagagacgtcccttgtaccctaaaactagaccttaaaagggctgctcttgggtttcactcaattttagttgggacgaaaaaataagggccgatcccccatattcaaccagcttggattgctccctagtctgtgcccctggaccggatgaatatcgaaactctacaggactccaccggtggatctttagccttcagcagcggtcaagcaggactgctcagaagaaatgagatcataaaagctgtcagatgttcatatgtacggtggtaagatggcagtgttgaggcggcaaatcatcagactcaattgtgattgatccctcgcacaccatctgcaaagggagcatgacagccaactgttgacaaaaagacggtggcgacctgcgaacttgccaccgaaaactggtggccgatgtccacacgagattgccgttgggcaggaatgcgtggctttgggcagctgcgcgaaggctccgagcttctggtccactcacaacccgccaatgtcagctggatcgcacagatcggagatcccctgtctcgtttgtttttttcttcaggttcgagactgtcgtggacgagttacaacatcggaaaaatctgcacgagaacacaacatctgactgtgcaggagtgggtgatgaaaaataagcaggcaccaagtgatgggtcatttggacgtcccagaatacggagtacctgtggatattgaaggaattgcggctgtcttggacatgtttatgttgttgaagaagattaaaataagtcttggtatgtaagatgtaccccgttgttctacggagtaataaattggactgaagattgcagttgcccctgagttcaggagacctgtgattagtaatcgtacacaaccatcgctctgccgccctcgaccgcctgttggtgctcagctttcagttacattcaggtacggacaagacttcctcaagaaccgaaagactcgggtctcctgcctccacgggcactccttttctgagaccgtacgcctggaagatgccaacgacccttccaaccttgactgcccgcttttgagactccgtgacaatgcctgcggtagcatagagggtctcccagagaaccctccgtaattcgaggtgacgggcatgaaagtgccagccatctgcaccaaaggttcctagcaaggtctcaaggccccaaaatgacaatccaaaaggaccaacagtagcatcacgccagtcgactatactggcaatacctcctgtactcgggttgacatggatattcatttcccataggtcggcatggtttagcacctgcggatagtctagggcgaaaagcagtggtagttgatcgcggacctcggacctcggtcagcttagcacgaaagcgctcaggaagagcatcagcaagagtgtccagcctttgctcacggacttcagtcagctcggcacgaagcgctcaagagcatcagagagtctctaacctctgggaaatctctacagaagtaacggctgtgtctatccatggcgtcatatcgattccactagtccagctcgacgcgaaaaatctagaaagttaggtgtttatcgcaggcagtgtgttcaagaacactttgcaagatcatatacagtcctctcaagaaggctgtatttattcacagcgcaaatctcgcgttgggctatagagaaagcgaccccttctacaacatccatttcatacacgataagagggcctaacgagtcgcgtctcccacagccaggggcgaaatctttatacatgcttttcactagtgacatgaccttcatatcaagagcggcttcaggggcgcagaattgaatagctttaggattgacactggcaataaccgtatagctcgtcatgccgtgtgccggcgtgggagcaactgatccacctctggtaataagggcagcagtgttctcttgtgtgatagacttgtttttatcaaaaaatctggcaatttgatgattagataaagcctgaatgccagctgcaatccaccatgtatctagtgatatccatcgctaggctggctggtttcttggttggtcaagtcgtggatgtagtatgcgcgagcagctaaaagaggactatgggcagtatacaaagcacacggtggtaggacagacttatacggtatgttggaagtgttccagggtaggaaaaggttaaatggtgcgcttaaacacagaggagaggggtcttatataacgaaagtttccaagtaattaatatcattcacaagcggccacctgaataactaacacaaaacaatgtatgactcaacttacaaccctccagggctgctgtatgttgtagtctatagaagagggagaacctcagggcacgtgcccacactagtccattttgggttcttgtcccaaggtgagagcatcggattccagctctgaccgacaaccccatggactaatatttaccgtcatgacgcacgtgcgagcatgtccgaacccaccgagtcgtccgatcccttgaagctctcccggttcacctatcgacaattgcaattgttacgacagggatccacggcaacccctctgcgcgtgattgcgcatatcgatctcgatgccttctatgcacaatgtgagatggtccgcctggggactccgcgggagaccccattagcagtgcggcaatgggactccttgattgccatcaattacgccgcgcgaccgtttggaatcagtcgattaatcaatgttgcggaggccaggaaactttgtccagacctcgtcttacagcatgtcgcgacttttcgagagggggaggggggacggtgggcatatcgggatgattcgttcaaaaatattagcacggacaaggtgtcgctggatccgtaccgagcacaatcgcgaaagatcctccagacgatgaaggaggctctggctacatggagtgtcgatgatatggaaaccgaaactcagaatccgatctcggctgggttggagaaagctagtatcgatgaagtattcattgatttgtctccattgatatatagggcacttcttcggagatatccagaacttcggatgggaatacaagacgagaaccgggatgcacaacttcctataccgccgatcacagctttgcagtgggacaccgactgcttagtggacctcgatcaacatgaaacagaggaggatgatccagactgggatgacgttgtcatgctgataggatccgagattgtgcgatgggtgcggaacgctgtctgggagaagctcagttacacttgttcggccgggcttggccgcaataaaatgatcgcaaaactaggaagtgcgtgcaacaagcccaacctacaaaccgttgtgcggaatcgggcggtgcagaatttcctaaatggttataaatttacccagatcagaatgctgggtggtaaactcggcgatcaaataactgccgcatttgggacggagaaagtcagcgagctccttaatgtaccgcttgagcagttgcgcactaagctggctgatcaaacagcatcctggctttacgggatcatccgcggtgatgatcgcagcgaggtcaatccccgaacccaaattaaatctatgctatccgcgaaatctttccgaccgagcatcaactcacttgatcaagctgagaagtggcttcgtatcttcgcagccgatatatatggcaggcttgtggaagacggcgtgcttgaaaatagacgtcgtccgaaagtgatcacgatacaccatcgaactgcgcaatctcgttctcgccaaatcccaatcccaggctctaatacaattaatgagaatcttctctacgatctggcgaatactttgctccgtcaagttgtggctgacggacaggcatggccctgttccaacctgtcgttgagcgtctcaggctttgaagacggcgtggccaacaacaaggctatcgaaggcttcttgattcgtggtgatcaagcgaaagctctaagtcattcttcaagaccccgagataccgataattcccccagcgaacaagccccaacggagaaaagacgaaagcttgaaggtgacggggataagatcaaaagtttcttcgggatcccatcacatcttgaaactcctgccacagacgagccagctagcccccaagaacccgctgaaaaagactccgaacccagcgggattccccggctcgtatgtccacggtgctccaagtcgatgttcgagcatgaaaaagaagaacatgacgattggcactttgccaaggaccttgcaagccaggacagagaggaggccagggtttcacagccgccaccgcctacgaaaagtagtgcacgcggtacaagttctcgtggaagaggtggccggggtggagggagtcgggggaagcccgaaaaggggcagatgcgacttgctttccaatgacctatgagcctatgttgtatgtcttgtttttttaccatgtttttcataatctgcttttacttggcatagctacgatatacccaatgccacaaatttatgccatcgcctgattgggcggactaatccaaagttataccttgaaacgtcgattcacaattaagccctttcccgccttttccgccgtgtacctaaggagaatatatccataaaaaatacacgatttaattaaaaagagatcatgacgttctcaccgactattcttctatctcagaatttcgcaatgtcaacataagacgtcctgagatatcttggaatatccctgggctgtagcctgtgagtgcctggaagtggatcggatgttaaagtcggtgtataccaggtggaggggtggccttgagcagaagcacccaacaacccacgtcaggcaagctttgggcctctaaggacttcgatgacgctaagcatatgagactccaccgagtacatttctgaagcccaaaatggcagtttgagagaagagaaccaaggttctggcaggattagctaatattctggggtagggccggagactggaagacctggggaataaacaatggaaacggggaatctttggaagatctggatgggaatgatgtttagctacatatctcgcaaccgccctagtgacatcagccgcggggccgatgaccactttgcttttttccagggttgtcagccttcctcaaaacagttcacgtttcatgtatgtgtacggaatacgatcagttggttctcgtctacctatattgcttgtcgtactagtatcattagccgcttaactgggtgatcttgactagagcacagcccaccttcctttgcaagccccaccagtcaccaactggatttatctcttgccttcaactgaaccctttgacaggctcctgcgagcttgaactaagagtcttctccatcgtggtcgagtttccgaccgtagctacaccaaatccaatgcggtgatcactcgcacagtcccacaatgccccgccgaacaccaccccgcgactacgacgaagaagatgacttctatgaagttgaacgagagcgagaccgccggccgcgccgacgagatcgcgactatgaagatgtggaatttcgtcgtcgaaggtccgagccgctagctgaggatatggagcgtatgcacatccgagaacgtcccaggcgagacttcatggacgaaagctttgcaccgccgcgagcacgggatgatgtggttcgcacgcggacaaaggaggaggtcgatattgtctcatctgaccgcgacgatgtctccacgcggccatctgggccccgtcgtagacctcatttccgtgatgaagacgacgaggatcttgtttttgaggaacgagagacacgccggggcagtcgacgtcatccacgcgaagttgacaaggattttatttttgaggagagagaaaggcggccagagaggaggcatcgtcccgggcgagagcgagaagttgaagatgatcttgtcattgaggagagagaaagggaaagaggtggtggtaggaggcgtcgttcagagccgatattcgaagaggatgaggaaatcatctccgaacggccaagacgccgagggagcaggcaccgttcccgggaatctgaagaggatgatctgatcattgaagacagagaaatacgcagggggagtcggcgtcatccagaacgaatgtccgaggacgatcttctcgttgaggagaaagaagtgcgccaccacaggcgacgtccagaaagcggattcgaagaggatctgtcagttgaggagcgggggaaacatagaggaagaagacgtcgccccgagcgcgaatttgaggaagaggaagtgttcatccgacggaaagaaagggaagagcccccgttagatcgcggatgggaaagtgaaatcgacgtgcgatcgcgcgaaaggatactggagtttgaggaagaagacccataccgccgacgacggccacggccacggcctccgcctccccaaacggtccaggtggaagaggtcatccttgacgatgcacccccaaagcgacgccgaggaccagtcgatttttcagatcgagaaattgaagaggatgtggtcatccggcggaaggacaaggggccacgaccagacgacagtgatgacgaggagaaaatcgtcatacgcgatcgacgtgaaacaagacgcagtgtaccttcggatcccgagcccgaattaagaggattgagaggtcttcggcgaaacggtaggcgacggattccactggatggagaggttgaggaagagatcagtattcggaaatcggacatcccatcacgccagtcgccgcttcaagtccacacacctcgtatgaaactacgatctcggagaggcgggcgaatgtcagaggaagaaataatcctcacacgcagtgacagtgaagactctctcgctccggaagactcaatatctccaactagcgggccatctcttggtttcaacgatccgtgggagcgggaaacaatttcacttcatcgtcgacctgtgccgctagaagacgatagcgatatagctcacagccacgaaataagggctccttccatgcgtgagatggaaaaagacatagtgattgagagcacgcgcgtagtagacgaaggccctacaaacacggatggctggtctgtggtgcatgcttcatctcaagacgaagccattatgagcggagctctggacgttgttgaagtcaaaccccgacatgtgccactggaagaagtggaaacgggccggattgcgcagcaggtcacgggcgcggatgaatcgccaaacgatcggtggaccgaaatagcgaagagattggtagtgagggaagctattgagcagctcggattcgagtatgaagagaccagaacgtgctactacatcttctcgtacctcaagccggtatgtatcatccgaacagacgactttcttggattctgacttttggccacaggaggacatagatgagcttgttgaattgaccgacgagattcgaagtgctcgtcgtagacggatccatgacatccagcgggagcgctctgtgcctgatatcaggcctcgccttagacctcgtgtggggatgcctccgagggcatggttgattgagaagcgcatgcgagatattcgagatcgagaatggatgaattcccggtaattgatctaggaatatgatgtttacggcctatgatttatgatgaatttgtgcattaaaattggaaggtgccattgacgtcctgtatgtatcgcgagatatcctcaattcaagaacgatgtcgtccacatgtcccttttagtatgaatagaacgcgcgggctatgtataaaagatataataatcgctcgagatcaagaaacgtcttcttctctcgttcacacccagaggtataccctatatgtaagaccaatatcgccgacatgtatgatgttccttcctgagcataaacagaatgagcaggccacacctgaagaatattaatcgtttgcgatcaaaacaaagcttcccccctccttcacactccctccttcacataccctctctctttcacgcgttccctcttcacacgcagtgagatatcctaacttcaagaacggtgtcgtccatatgttacttctgaatgtgaataaaacgcgtgggatatacctgaaggatatcaatcgcttgagttcaacacaaagctttctatctcgtttagaaaccgagcacacgcgtgcaaatcggattcccacctcaccgtctttgatgcaggattgcctccacgtgggtcaacatgtcaaacgcgtccaccactgaattagatcgttcagttactgttgtccgcgttaatgatgagcgtttcaatatccagtctccccagcgaaagatcctccttcgccaactcaacagagctcttttcgaacaacaagtcccctcgccattctgggccgttctccaggtgtgcgatatcgagaagcttgagtacatcgtacagctcgccaacttgtcaatgaaactcatgcataccatctctgatctcatttgtgctctcccattcaaatggacggcaactccatctgtcgcccaacagctcgaatcagcatactcaaccccgacttcgggttcgagtttcagttcacggccacgtgcttccccggttgcaatctatgccgcccgagagcgagatggatacaagtgtgtcatcacaggaacccgcaagctctaccaaaccaccccgatcttcccagctagtgcagccagctcccgcttgcaggatgacccggattctcctagcctttggaagtttgcagatgtgttctggggaaagagtacaactgaaaggtggaaacgagccgtcttcagtgacccaactcagcccgacaatcctgtcaatgattgctccaatctgatctgccttcgcagagaccttcggtctgcatggtcgagtgggttgttcgctctgcgtcccgtctgggtctcggaggatatgactgaaatggaaatcgagttctattggcaaccaaagccagaccacaagctttacgacgtggtggatgtgtccaaggagcctatatctagcaagaacgtcaacagcgtggatcgactgatcgtggcggtaggaaagcgaggtgaaccaacatatcgtgccattgagtccggctaccgatttagaatgacaacggacgaccccgtccttcgcccgcttccgagtttcgacttgttggatatgcagtggcatttcacccgactgacctccttatccgccgtggctagtttcttcgatgctgatgatgatgaagacagcgtcagatcagaggacagcgttagatcagacacgacgactacacagccggagcaccgcggccgaccggagtatcaccctctgcatgccaaccctcccagcgcccacatactggcctgggttaaatcttcactttcatctggttccccgcccgagtcagagcaacgcaaccgactggagggtgatcctctgcgttcgtctccaagctcccacattctggcttgggtcaaatcttctctttcacctcccgagccagagtttgtcgaggatatcgatgaattcatgatggatgaagcgatgattggccctctgccagggtccgacactaacggcttgcgcagtgttagccagacctcgaaggattccgggtcggcggagtcagcgggttcggcggattcaggagattcggaagccagtgtgatgattgatgtgatttccggaactggccatctatctcttgacttcagccgcgacagttaagatgggagcgggcccaacataattcatgtacaacagcagactagttgaattcatattcttattcaatgcggatgtatcttgagactgtagtatgaatgtgttgattgaatctggggtcctataactcagttgacttgacggacatacaatgttgtactcattgtatattgtatggtcggaaacctgcagcaggaagtgatcaccgctgtcctccgtaggcttgtttcagatgctggacgccacctgcaagccaccaggcacaatagcaataattattgacttagccctgagcctcgccacatgttgaagtcgagaccttgcccaaagaccacctgggaaggccaggcctacggagcagagagagactggtcgagtaaccctaactacgcggcacccgaaagccgggagattacgtcggactgggttagctcccccttcccgcgcattgtggcggattgtctcagccatattatgccacaacatcatcacttcaggatttgccttggcagggaatattcgtaagtacggagatgcgtattaatattcgtccaatgatgctcggtattattcgcgactattgattctgtatgggtcgttcggggaacacacgacgtgtcctactgtttcaactgaaccactgcagttgtatttgtgtaactgaagattgaactattacatccttcggtttgttatagtatttagttatgcacctgctggaatttagatcgatcggaaagttgtagctagcacatggtatcatttttttatctttacgccgagtggagactctccacttgggagatgagtgggatgattcatattggacgagtcgataaaggagagataacctttgaaaaaggggaaaatcatggatgacacgtagaccgtcgtccgtagagtgtacggtgtacaatgctgtcctactgtgttaggatgttatacaaatccaaatatccttggtgctccgttctagaccggaggatgaatgcacaagccagtctaatcacgttctagaaagaaaacccgcccggaaaacgcacttaatagccggtaaatccacgtatatcctagcgctgtttcatccaagccgagttcgcttggatccggcaaatcacagcgatctctctagtcgatcgtcgtttgtggcggctgggcatggaaggcgagagcgaacattcggatcatatacgattcctgataactagaatagaatatagaatcctgtgctccgtattacctcgggcctagacaccccgtaccaaggatttgcaagttgacaggtggctactccgtatttgatcgtgatatactccgtcggaggacgggagtaccttggaaggccctcggtactgaagactcggtccgggtcccactagactaggaactccgtacaagttaagttacaatgtggctaagctgaagagatggagtggaggaaatgcagtgctattgccacaagcttggattaatatcggcggttccctagctttatttataaataatacacccaggccagaaatccagagttggaacattcttgttcggcgaagttttcctctccacttctattacgtatgtccactctaacgctgcaaaccgggtcatgatgcactgacgatctcttggacaagtgtttcggatatgagatatgaagaagggcagacgggacataaatagaagcacactgcctgtgcgtaggagggtagacggagtgatatagatagaaaaaggaaaaaagaaaggtatgcagggtggaatgtttccttggtatagcgatcggtggtctaccagtcaggccatggcagtggagaagaatcggattaggaaaaaaggcaataaaatacttgattgtatgttgttgtggtatactgtggttacttgtacggagtgtgatatacgtagattatcgaacggggttttacaggctatgtttataggcggtttatcggctgtttatataggcgtaggcacaacataactagttaacacaacccgatcgctaaagatgatccagatgatctgtcaacacaaatgacatcgatctcatttaataattcaaatcccagaaaatagaaatcaggatccaccggatacgtcgggactcgacatactccgatgaggataaatgtaggatagcaggatagtacctggagagcccgtgactgtggagatcccccttctcctcttctctctttctctctctcccctgtcgacttcgtcttttcctccattcattttgtttctttcttttcttgtgattttgttatgcagtcgaaatgtgttgacaccctacaacttttgcagcgttaaagtgggggacaaataagacgacatttcatattagattcttcaaccctctaggtgatcgacaattcacttcggtcggcccacacacactcaacttcgatcttccctcgacgcctgggacctcactgtcgcttaccctctcacccctcgggcgcgggacaataaacagatatcaacggaccttccggtttgatgggaaattctcgatcgagcacacccaccatgaaggtcgcggtagtggtctcggtttttgctcttctggctcggccattcgtatcggcctcatccgacctggcctactgtgctacagagaacacggggtcttctttcacgggaggttagtgatcgcaaccgttctatatagatttagccacatcgctgactcggcacacagtttctaacacatttcaatcgaatggattatgtgaaactacctgcaccgattacgcttttgctatcctccaagggagtaaatgctggtgctcgaacgtggctcccgccaagtcctcactagccgacgacacttcggactgtgatggtgcatgcccgggttatcccgcagacagttgtggaagcacatccaaaggagtgtacgcctacgtggaagtggtcggcaacgatgcgactagcacagccgctggtacaacaacttcgaaaaccacctcgtcaacctcaacctcgaccaaatcaacatcaacctctacctcaacgacctcggtaagccaatcctctttgttttgacactgttttctcttttgggcatatcttgggcacactgggcatatcttgtttcctgtttttgtaccgataaacctcctgccagcctagctagcctgattgggtgtttgactctctcttcgcttgtgggtctaatatcggggatagagtactagcgacccgcctgtaacggtcactgtgactgcctccgattccactaccacttccactaccacttcgacctcacccattgtatctacagcacaaccggtttgaccagtggcacgtttagctaactttttctcctagtcaacttcctcggatgataaaacaacaacttccttgccgacggtctcagtgcagaccaactctggcggccaagtcaagaccatcaccgtttctggtgcaagtgcaacttctggcgctgattccgcatcgcctagcaccaccactagcagcaagtcgaaattgagtggaggttccatcgcaggcgttgtgattggcgtcctcggaggactcgctctggttggtgctctcatcttcttgattttcttctaccgcaaacgcgctcgttccgtcagccctatcccaagccaagacatggcagacgacagaagcaggggatcgagtttcatgggaggtttcttcccgcgaagcgataacggatctctgccctcacgtacgggcacaacatttaccgatcggcgaatgaagaccaacacggtcctctacccgaacggtcatcgggacagcagtgtttcactgcaagacaacgaagactactcgcgtcctgttcttcgggtaagttgaacataacacttagtcccggcggaacattcttgctaatatcattctagcttaccaaccccgactaaatttggaatgaccattttcctcgaccactttctttcgcttccatcgtccgcgcctctcactctccattaatctccagccactccaaaacagcctcattatgatacccacttgtcgctcaatttctttctctatcttcccttctattcttatgggtgcagctgtggagaatacacggaacagcaacatgtgactccgggcggcctctactccgccaaggaacagttatgagggtgcattgacattcctccaaacacactagaaggacacggaaaaataagagcccaagtcctgaattcaaatctatggttaatcccccggccactcgagacgcccttcacgagccatcacatacattatcctgcatacatacccgccacatcggcgacgatgccagcccatgccgacatgttctgaaagtatacatacatcaccgtctttcggttgcgtctgacatcgccagcctctgggctcgtcgctctcttggcttcttatcttttctcttatttgttcccaatatgcttattagctttgcttgttttctcttcatttgtcatgtaacacccagcctcttttgtcgctgcccccgtcttaattgttcgtgcatttgctatggcttcgatctgaggggatacgtccccggcgctgtgcttagactgaccgattcaatgaaactactatatgcttgggataggatttggtgattacgttctgggattgtatgtttattgcggagcggagcgaagcaattatagaatacttgtatcaaagttatacataaagccgtacctaaacttgagaagggtaagaaatatgtatagaaagacaaacaataaggctgcataagcggacgaccaaagtttcttgtgcctatatacttcaaacgtgaaggtaaatgactaccggttggcatacttcgtcgccgtaaaggcataaatgccagatcattcattccagggggcaattgtgatgcaaatatacgatctaagggacagaagaggtaatcaagcaatgtgcaatgtgtaaaatatatggatgatgacctaaatagctactgccatgaaactctctgagtagcttcacgcagacaaagtcacaaaagacctcctcctctggaaaccaggagaatcatcttctgcaagatgaatccaatcctgccctgccaagggaagcttcagtctttctcacagagcaacttcacgacctccaagcttccatccgaacggcgcacataagcgtctcagtatattgcgcacactacggcgaatgagcatacggacaatgtcaacttcccaagctgagattgccaccagaatctcacggcctcctatatacttccctggggcaagttcggcgttactgttccgcatcaagcgcgcaagttcaaaatgacgattttgaaaaccagtgagcagagtagcatctatcgatttatctagggacttgggatcggcatctgcctcgataaattccctggcaatatccggagctgtctgcttccgtgcagcatgcagcggagtctcaccccttatcgagatctttgttatagtctcatttgtaaggtgaggagccaccttcgggaagaactgacaatcattgcgcccggccagagcatgtgccaccgtatccctgttcgaggccgcttgattcaaatccaagcctgcgttcatacaaacctgcatgacttgccagctagcccaacgagctgtatataataagcgaagccagcaaccttggcgccgccggaaaaggcacgaagcagcgccaaatcggtccagcacataaagtcgtcatagggtgcgttgcggtacttgaagtgcacataggaagggtcagcaccgtattccaggagtaaagttaccatcctaggttggttggcagcaaccgccacatgcagcatgaatccaccagtaaggctgtaaatgttagggtcgacgcccgaacgcatgtatttcgtcacgatgtcaatatccccgcgcttaatggcacgcgcgaagatctcgcttcagtgcggcccctttgagaatcggaagtcgtaaccccagagtgaccatattggcatgtcgattccggcaattgcatttggagaattccattcccagtcttgtccctcgtattcttgcctaaggggtaggacttgcgcagtcagtcgtcttttctccgtgacactatccgcgaggagcgagtgtaaatgcttgcaggtttggtgaagcatacagcggtcccggataagcgccgcatttgcaatcgccagaactaactcctcgggcaaattgcctagcctgaaggtgcctaggggcaggctggggcttgtaggtttagacatggtgcaatttggcggtggacttggtgacaagggttcttgtcgaattttgaatgtagacgtcaagccttctgcgaggatgttgatgtaacttttatgcaagaaaaacggttaatcatgagagctgtataaataattccaaagtgttggctccatgctgagcaggcttaatggactttaagagatgccacagagacctaacacaatctgtatttcattagctagggtttctctttgttctttctgtcgtgatatcaatgatatcaatgaatagatgcatcttttggctctgtcatctatagcttgtttcacaaaggagaaaaatgagagagaaagggaaccatgagttttcttgtgttcgctggcaaggaagatcaaacaaggtatgggcaacctgaggcatggatggtctcaacaaaaggccagacatccaaaacaacaataggtcctactgaggacaattccgacggaaacaaaggaccgagcgtgtcgtccttcaactagatacttgccacttgtagatactttggatcaataacatccgcatatcatgccgtattctaacccctgaaacgaaacttgatcgtataaccgataaaatatatgcttttctccgtggtggcagttgtcaccgtggcacgaatagatgcatcatatgccgagtgttccgcgaagcgctagtaccaaagtactgctcgtaaaatattcaaaacacagtcaagctcaatcaaatgaatcaggattgccttgcacaggtatctatctagactgctgctgccttgttgatgcgcaccttccctaacttgactctgcgagccaaatacaagaaatatatagttctcggaacaataccggcaatattggtgaagcgctttctattattattgaggcgcaaatatgactgataattaagcttttcacataaatggacggagatttaatctcaatgcagctatatgcacctatttagatagaataatatctgccgccgcttttatagccctggctcagtgagtgcgccgggaccatttaggcatagatctcagcgcgaacctcaatggaactgcacctacccgcagttccagctccgagatgcagttcagattcaaatcttagatcctgaggttcttcaaaatagaacaaacaaaagaaatctgcttatccttgtgatttacatgaatcatgtagaccctggcagtgcttcgtatttctttttatttcagaaggatcggcagtaaggcaactagagtagcttggaggaaatgcgtggagaaggcaaaagaaaaagacccatggattgagcttggctgctagctaagcgagagaaaggaagaccaatccagggagggagcaaaagtcctagttatccacccccaggcaaaaagctgactcaacaacctgctcatagcataaaggcctagaactgagacctaagctaaccttgaaatgagatcggtgatgcatttggtcccaaaggcggcttgccgtgaggagtaaataatataacctagcgagtcataaatatcttcacccactagacaacgcatggcgcttgataatcatgatttattaccgcaataggatgcatgtgacattggaaggattttattgtgggataggacgtatatagagtttaagaagagtgaggaaagtacgacactgattgagcgcctacaccgagtactttctgtgaaaataaaggggcgcacgcctcgtacaaatcatctcagtggatatataagggcaagaggcgtgggagagaattaatcgtaatttccacaaatgggaggaagcaagtaacaagataagtgatgacttttgcccacgttccatgtgtttctgcttagacgttgccaataatagataaataatagcgtgaaagacaaggatcccaattccggctttctggctactcaacccctaaacagaaattggcagtactagaggcagacttggcgagtggagatatccattgtcgttgtgaaagccgagatttagggttaaaagtacggtaccatggaaggaagcgggacatcccgcgcgtgtcaaacggacggattgtggggccccggcatgtccccggcactgggatcgaatggcattcggaggaccgttacgaagttatgaagtgtcacaaccacactagcgagtcattgcccagcccaggccctagaatgtactttttgacttgaatagcaacggctccccctatacggagcacaccgacactgagctttctttgggactgaatttagtttcatgtccgcggatcatcaccagtccgagcaccttggatagatcaaaaacaaaatctgtcatacaaaggagtcttcgtcattaaatagctgaaatatacatatggagtggtccacccggattgccaggatatacatcttcaggtcgcagggctgtgtcattctttcgtgatttccccccacacgcaagaccgcaaaaatgcctagcatcactgctacaggtgactttggcccagcaccggccggggtagatctggcgaaaaatcagacaggcaacttgttgggagcggttattcctgtagcggtgttcgggaccatcgcagttatattgcgattagttgcgccaatgaagaacaaagaggccagaaaattagctctcgatgactacctaatcgttgcagctcttatattctcttggggcacagcgatatcctgctttataagtgagtcaagatgagttaaatggatggcacatcacttacaccagattccctaggcattccatatggtaacggttaccatttacaatccttgaacaaagcggagtttattactgtttggaaggtaaggaaaataccgaacgaggtgcttgggatagactctaaccaaacattcagatactttttgcctatgtgatgatttacgccacagctatcaccttcaccaaatcctcgatcgtcttcttctacggccgcatcttcaactttcgctggtcactaggcttctgcatgttcttggtgcttggatattgggtcaccattatcgtcacagttgcagtggcatgtcgaccactgccatatttctggctggcctatactgatccaacagccgttggtgtatgcattgatgtgcccaaattcttcttcggcaatggaattgctgctatgttgattgatgtgattatactgtgtatgccaatgccaacaatttacaagttgcagatgcaatcgtcgcagaagctagcagtcgtgggaatcttgctcctagggagtttgtacgttcttctcctctcctactatatcattgatccgggctaatcaacctcagtgtttgcgtcgcaagtatttgccggatcatctcgcttcagaacaacacccacggaacagacgctacgtggactatggcaccggtctttatctggtcgtccgtggagcctttcgttggtatcatctgcgcgtgcctccctacctttgggccattctttcgtcggtggtggtccaaggctcggacagggcgctcatcaaacagccgcaacaccccaagtggcgagaatgcatctgcatctccttccacgacctggctccggaaaccccgagccaaaaagccacccatggactcactattcagcatcaatgaatttagctgtgtagatgaagttgaattaatgaacgatatcagtggcccccgatcgctgagggacgaggctgtgagtgatcatcatgatgtggagcgaggagacccttgtgctatcacagtccatcaggaggtggatgtgacatgggataagtataaaacacgcaaataatgctgatctgccttcaatggggagtccctgggctttgtgtattgcagtttgagacgcatcacattcgagaaatgtacgatatgaaataaaacgtgccattggcacatataccgtcctggcaagcggaattgagataataaaagaaaccttaacttctcgcacaaaacaaatgggaagcataactatgcagaaatacacgtgcactaatactccgagcgttgtaacaggtacgttgggggtcggttcattgttctccaaggacccttcaacgcaggaccgtttttagcgtgaacccaaatttgcgcttcatttcgaaacttggcgtgataggcggcgccatgtgccaattgaaaggggtaagaattatggaaattatggagagagttactactccgtactttgtactccgcacgtccgactagtttccccgtgctggtgtggagataagctgtctagtgggtttgccaatagccaacgacttcttctcaattgacgctatataccttcagaaacctactccgtgtacaaaagtacagagtaacagcctagaccaaatgtgttccccaaagccaaaactgagggggaaaaaagaaatcaccccatatgccccctaacttctcatttcctctaatctataaagcgggagctatcgtagcattgtaatagaaattcacaaacagtttagtcttcaaacccctcaatatgcctgaccttactgcaaatgggttaacacctgctacccgcgtggctaacggcgagacccctcccaattgggtcccttgcgccgagcaacctgcctttgcgcgacggaaactaaagataatctgtatcggcgcgggttactcgggtttgacacttgcccacaagatcgatcatgagctgaagctcggcgatgtcgtggatttcaagatctacgagaagaatccccaggtcggcggaacctggttcgagaatacctatcctggtgttgcttggtgagtagtctatacttccaataaacatactttattttctaacatatctagtgatgtcccggctcgtaagactcctcggtggctctttggaaaccaaaattgacattcatttagatgcatacacattcttattcgaacctaacccaacctggtcccaattctatgcacctggtcccgagattgaggaatacattcaacgaacaacgaagaaatggaacctggacaaagacgttcagtttaacactcgtgttactgagaccgtgtgggacgaggagttgggaaaatggaaagtggtggtagaccaaaatggtacaatcacgcatgacgaggctgatattctggtcaatgcgtccggtttcttgaagtgagaatcagttatcctcgacatttctactcttattaacggcgagtttcctgctagcaaaaccaactggcccaatattgagggcctgtcgagtttcaagggcaagttgattcacacttcgacttggtaagtaaatgttatctatgaacccaaacaaatattaacaaccggtatagggataacacctacgactgggaaaacaagcgcgtcgcagtcattggtaatggctcttccggaatccaatgcgtggctgcaatgcagccgaaggttgccagacttgtcaactttgtgcgcagtccgacctgggtctctgtcaacttttgcgcggagatgacagcaagtggaggcaatttcaccttcacagaagaggagaaaaagaagttcgaggaagatcccgaggctcatttcaagtaccgaagagggttggagaacaggtaagttcaaagtccactccccgacagaggtcagaactaagtcaattccgagtaaagtgtcaatgcgttcttctttggtatgtataaaggccacccgatgcaattgggcttgacacaggcttctgcggatcaaatggcggagcgaatgaagggaatctccgacccagaagttgtgtcaaagatgctttctcatgatttccgtcctggctgccgtcgcttgtcgccaggagatgggtatctggaggctttccacaaggacaatgcgactctcacctttgatccgatcgaaagtatcacagaacatggtatcaagacatcgaaaggtgacgagcaagaatttgatgtgatcgtctgtgccacagggttcgacacgtcctttattccatcttggaagctggttggccgcaatggagccagattggaagagcgatggaaagtcaaccccgaggccttctttgcggtccaagtggagtcaatgccgaactactttatcttcaacgggccgaattgccctatctcccatggctcgcttttgaccgaggtctcttggacatgtgattacattcttcgctgggcgaaaaggattgctgaacatgatatcaagtgagttattgtggtcttcgtaggtccagtcgtatgactaacatatctcgcacaggtcaattgatgtcaaaaaggaagccatggaagactacaacgtttggtgccaggagttcctcaagcgtacggtctggtcggatgagtgtcggagctggtacaaaaacggaaagagcaaaggccaagtcactggagtatacccaggcacgattttgcacttcaaagactgcctcgaaaacatcggcggggagcacttcaatgttgactaccgctctaagaaccggttccgatgcttaggtaacggcgaaagtgtgcgtgatctgaatggagcaggtgatttggcgtggtacatggacgatttgaaagtcaccacaccaccactccaagtcaacggcaccaacggcaccaatggcaccaatggcacaaacggcacagtttgacctatgtcaagatactttttactatttaccgttgctatactctgtatttcactcaataaattgtatattctttttctcgaaagcggaaacccacagcacttacctcatttccttcaatttccgatctggtagtatgtgtctaccacatcatccttcgagtcgccttgagatacactctttccagccacactccgaatacgtgtacctgtagggggcgctggtgctggcggcaacatatcgagcactacgtcgaattgatcaggcacacaggactgacgttcagtcacaaaccgcaaaagtccccatacagcatgtcgagacattctagttacttgcgggacaatatggaatgggcgaggctccgggcggaccgtaaatgtttgcgcagggccactctcagggtggtggatgactacagccttcctgactgggggcattggaatgggtataccgaacctataaggcccatcgatctcctgaactctagcctggatttcatcccaggtcttccgatagtgagtttcgaaggtactcgtccactcctcgtcagagcgatagccggcgagaccagcgcacaaagaccataagaaatagttagtgttggtccatgtggaaatacaaaccgcccatgacctggaaggaagattgtgcttctgacgaacgtcacagcggattactggttgctcggtggcttgcacgacggcaatgggtacaccgtggatcgggtgaacagcctgccagttgtagttagctgacatgattcctgaatttgttctttctaggaggggaaagggttagacttgtaagttgtacttgaccactggaataaagggatcgcaagccctagagccagattactggaatagtgaagctggcggagcacttgatgcctatctaatttagagcaacgggggctttatatagcttttggagagtgggtttttattctatggtaaagaacaaagaaaaggacctttgtcttccatcaaagaggagacctgagacatccaaaaaaagcacgttgtcaacggatatttgtctccttattagaagatgcgagtaacaaggattctttgtctgatagtctctttgttctttttcgggtagactgatatttttctctagaatcaccacaatgtgccagtggcttggggcaacaatcgaagaaggtatttagataacaaagcatgcgcggtaaagagcatgattggtcaatgcgggtcaatgcaagaccgccccaaggttgatctgcagattatcgccaagccttggactgtcaacggcgcatggtatggccatgtttcgctgtggcttccaaggcttctcaatagtgatgcatctgtagtggttgcattatttttttttcatttatgaaagaatagtgcttgtaataagaggaaaatcaaagggaagctatcttctcatggaaacaaagaaggtggaatgggaaagaaaaggaaaaaaaagagataaaggcaagaacaaccggagttgaaccggaacagtccaggtagtggaagatcttaggcacttccctcgtggtacatgtaatgttaccactaggccacctgctgttgggtcttgagtagtacattgatgttccttttctcttgcaatttttgaagctttgcttatgcatatacattatctctaggtaagtcacctatgtgcatgtctaaatgaatagtataggtcacatgtagttctcgacattttgattgaattccgaagactgcgattatcaggatatagctaagtctagttcaatgagattgaatttgaggatttagtctattgttatataatgtcacgattgagatgtttactatgtagagaagacttggaagcaacgttgggagtaaggtaggccgggacgatgcacttgttgtatggttgacggcggaccgagcgccaaggcggttaaccttaaaataaagtggagacatggtctgtgcacgggcgcatgccaagattttcactgtcaaagaatcttgacgccaaagtcaagacctaatacataatgacacctaaaatcgtaagatcagctgatggcctactggtcggctaagtcccgagacggcagtccctggacctgggttttttctagtactgtgtcctggaactgggtgctaatgttgctatccgtaggctcggtaaattcaaaagacctcctcgatcttgcttgatctgccacgtgttacgatccaacgttttccttccttcgccttttttcttgtttgctagtttgcattagctagattgtttgctacatagtttagcgagatgattcgaagtttgcattgtttacaaagcggtcaggacacagctataagaactagctgtctcccactttgcaacttgcttccttcctctctctctatcttagttattgtgttcaatgcactctttgttgaaaagacctggcacgtcacaccgcgcgttcaattgaaatcgtgtaatcctgactttgcaaggcatcatcacggcccagagatttatggaaatcggcctggaggaatgaacgaaaaattggggtgtgtgaaattggggtcctgcaccctgctcataacctgtttcttgaccgcttggatacggcctggcacagagagacgggttagggggtactctcccccgcgcccttcggcctcgagagccaagtagcctggggcatatagctcaacatcacttgtccactgctgtcggtcacagaggaacattgagtttggaagttggttagcgtccttggcttgacagagaatatcgacgatcggtaggtagtttattgggctggtaggtcaaaggatactcacggcggattttggtgtctataagcaccccgagcatgcttgatatccccaaaacctgaccaattcacgaaggcgctcaagtatggcattcgcatattgaacgggcggacttcaacagattctttcacagtcccgttgatttcaaactcgacaattgtcaggcccggttctcagacctagttcatcaaccaacatatacgggcctaaataaccgagatagagtactttgccagtatgtgtaagataaatagaccgaagtctgcggtctcaagatccgcccagggcagataatcctctattgatggatcgttagtagttgctggattaaggatagcctccgatggcatataattatcgagtagacagtgcccagtctcgatatcatagttatacaacaggatcgcgaatttcacccatcgcgctcgatttgcaggatgggtctcatcaacaggggcaagagaaatcaggccgttaatatcgattggctgaagagtatcgtagagacgttctaatgcttcggctgggtatcgaagaccttaaatgggttcatttatattcgatcttggcccctctgtacctggaagacccataggtgcacgcgattggtacgcctgaataagggcaaaaaaaaaaaatttgttagttcaatggacttcggagatttggaccgagtggaattcacatcacgaaattcctgtgtagccgaagcccatttttccaccagttgccggcggtggtataactcatatctctcatcataggaggaacctgcgtttgctacagaaacccaattctcctggatgcatgttagcgcataacttaaagacgtggttgtttgaaaattcgaatgctctaagaacatacctgtacaaatagtaaccagcccttgacttcctctttgatctagtccagagataaatctgtttctgggtgtggttggatggaagtggggattccccctagccagtgctgaacggatctcggcatcatgtgtgtgatcaagttaggggtccaaaggtccaaggaacaaatgaatcaattaaatcaacgctggagggaacagaagagaactttggccatgtactagtgaaagcttcactagcggggcgcctaactaggttgggacgaagccgaactgaacatcgtagcgaacatcgtagcggatgttggaatgaacgactactttacattccttataactatcctagaatcatggaactattcaaccaaagaaacaatgccatggagcaatcacgtatcaaccgcctagaatccctgctgccgatgccacttttcctgccaacccttgaaccatggactatcatccaaagtagagacctcccaatctttcggaactaatccattctccttctgctcgtctgcccattccttcagcctaggaattacaacatgctgcacatgccaaacgcccttgtaatccatgaggttcttctttccctccctaagaagcttcaacaccaaacccggtacgccaggctcatcgcggaattccgtgactagagtaaaaagccctttgaaattgaaaaccaccgcaccggacaagggtagacgcctgagggtttgccagtctacccgcaggtgacactcgtcaatggccaagtcagcccgctgggattgccgattcatttcgtgagggtgcccgggtggcacgtacaatggctgtccaatttctatgccccaagagcctcgctgaattggtttctcagtcggcatcttggtgaaaaatctaaaccaagctcttttgttagcacttcgatgatattcaatcttctctaggaataagaccgacataccgatccattgagaactgcatcttctccttatagtccggaatcggctcgtggatttcatgcaactgcttcccaacctttgtcgcgacattccaccccatcgccgagcagatcaccgccgcgcgcaggaaatagaatcccgtcgtgtcgtcacgaagcataattgcgaagtcttctggtacgttgtccagaagaacttcgagaggcggcttggctgtgacatcctgctcggtaccgagaatcctgttttgcagcacgcgtttgtccaccagtgtgaagtactgcgggtatcgggcgcagatgaactgcaagaccatctccatcagctccttgcatgcaagttcggagcctggcatggaatcaaggacttcctttccattcttagcgtacagttccttgcgctgggcgatgcggctcttgtacgtgttttcgagctcgatccaccagtctgtttctagtttggtcaaggctgtttttgaacggagcacgagattagtttcaaatcatgattgttccgctttctacgagacatacacatggtttggtgatacgcccatcggaatggacgatatggccgaggcagggctttgtcgatgttgaattcgggatatgggcttgggagtggaactccactgagagtcgcatagtctggaaagtcccctagttgcttgacttcggccacggaaaatcccatcggtgtgtacttgtcgctcgggctggtcatatagtcggcgctcatgggtagaatgttccgacgcacttcttcttcgtgcacgtcgcgtctgggtgtagcatcgcaattaagatctgcaagtgtgtgtctgcgttggggtgggagaacattgtcatagctagatggggaagttgggcttgttgcagctttcttttccggagagaaagaccgcggtggagtttgagaagttgaatgttttcgaccacgcagtttaactctagccaggagagatctgccaaatgtccgattaatgacagcgtaggctccagtggcagctagaaggatgaatccaactcgccagagattctccagagtccacaggaagttcataacggctcaatccatacaagttagggcaaactgcagatggatggggattctgattcagtatataaaacttataccagcacagttgcaaaggggaggctttgcgaatgtattgagctatggacggacagggtccacagagtataaatactctccgggtcaactgtgggcaaaacatattcggatcttgtcgcacttggatgagggatgtccgatgcggggatgacattcgtatccagccagagtgacaagagatacgcgttggatagctgctttagtcctctggctcgattggatttgccgtgttaggagaggaaacgctggcggtcgatgccatgtcgacgtcacaggcggtttattgaaagtggtgttatgcttatcatgttacattttccagatgtccttatcatatattctacctcgtacgtaagatatgtaggtgcatacggtgcatgtagatcagttacgcaggtttgtcgaatttacacactagagaggtgcaaaatggcattgttcggaggtgatagtctagctgtcaactcactccctacgctgctcaatacagatagaaccccagaggcgatgtcttggatgaattggttctgcaaacaaacaagaaaagataagaagggaacaagtatactgaaggggaagcccttgtattgcccaaaagggtaaaaatgtcccgaggcttggcggcagatgactgtctgattatgggggaagcacctgtggacagcgcacagcactggccacttagacaaaactcactataacccgacgtgttagtcttgtctttctggcaacctctaccccttctctggagttatattttttgtacactgaaagtcatattggactcagtcttctggttcacagggactgattcgctcatccagcaaatccaagtcctccagttgtgatcgcggcggcagcttccagagactggtaccacagacacggtctttcgtgagaagatcgtcgatgaactgatccatatatgtaagcgtgaaagtgtcgcgcacccgtcgcttcagtttccgataatcgagaagtagtggttccagggttttgtagacatcgaccgggtcgaaggtcagtcgcacgtagaaagctgcaagagcgcgcagatatttgaagtcgcctcgctctttgacaagagcatcatctggatcttctgcctcgtcgccactaccggggtcggtgtagttgagtagttcgaggatgacctctcggtcaggcccgagctggaggagcttgaatgcaaggcaaaggaagggtgtcggtttctcagagacaccgtatgttccaccaatggaggtcaattcgactgcgcgatcacacagagtcgctgcgttcaaaccgaagcactgttccttccagtagtatgagtcggtgatgcggtcgcgcacagctttctcgaagagcgtggcggggttgacgccacggaccagggggcccttgtagccgcggttatcgaggaacgagctggcatcggcacgatgggctgccattgtggaggtgagagcggatgcggaagtgccaaggcatcaaagagaaatgaaaagggccacggctgtttttttgcgaccatcgcgataatgcggatttggaggataccgccttcatcaccgccttcatcaccgcgacagatcccgccaaaggtcttgtcatcgtaacattgctctatcattggtttcatttgaatcgctagcaggaatcatgtccatccatcatgatctagatgggcctccggatgatcactgtctggctaaaaataaacatcttggtcaaccaacaatgttgttgtactgacaccgccaagaccacgcttatcgatagtcgcgtggacaacgtaaacaacctgatgtcatgaaacaagctaacaagcccaacaataaccttggaaaacatgcttggggattgatagtccagggttgttatatttgaacatcatcccgggggccatgcatgtctgaaattctaattttgccttatcacattctcattattcatcccatgcagcctcccttgtggccatggttcttttaacatcctccacagtttcggccattgtgtcgatgggagtgatctgcatatttactgcattgttatttttctctggatatgtcctacagcagcaatctgtcaagagcatccagcatgctttgaagccccaggaagctgcccaaaaggccaggtacaggacgggccccgcattccagaagccactaaaacgaggtctatcagatacggggtatggggccgatgaagatataccaatcattgggagtcaacccaactacgactcgtctggaaactatgcctatctccaaatgctatccgaaccagatccatcagacatctgctctgcaatcctcttcttcaaacaactctctacaaaaggaacagccatccaggaccgcctcttcatgtacccagagcaatgggaccggatgtcagccaagacactgggcccatccgccactaaagtattatcaatattacgcgccgccagcgccaaatacaatatctggctcctcccaatcgacatgtcagcagctacagctgcaggctactcaacaacaaacagcaagctgctccacctgggccagatccagttcatgcagtatgacagcgtgctctatgttcaaacaccgggtctgttattagacaccggcaagttggatgacatgctcctggctcggcccctgcctctccgccacgacaagaaccgcccagagtcctataacaatgaggcgtggattcctatgccgcttcgtgcaaaccgcgaggcagatctcccgcctgtctatctcattactgtcaataacatcgagaacgggaatgttgaggcaaggactcatgttcccaatcttgcgttgcctggttttggtagtcttgtggttgggcctcggggagctgcaaaagcgttgaaatcagcagatgctgatcagcctggttatgtctatttcgatagcgatcgtgatggacatgttaagtgggctaacaatccctactttggcacttggcgagctcagcaagctgaagtttgtgagggattggacttggacgaagtccttcatgatgagcgatgatctttcggtttttatatgacatggacttgtacatgttgtaaatataaaaggaactggcgttggtgttgtatatatttacatgacaattgtctcaagtgcaggatttgggtttggggcttttgggtacaaattttactgtctattttggttcaatatatcaatctcgcgccttcggatttcaagtcatgatattcgttcattatgtgtcactatgattcattaaatgtatgcttctgcatttccatcttacacagcttttcctattgcggcacaccgatctcgtaaccaaggaggacttcagtggtgtttccttcccagccccggttaccgctggtagagatcatgtaacggcatgcattatcgatatacagctgggagatagttccagtccgatgaccaggaatgatcaggaacggaactggcgaatggcgagaagactggtcgccttgctcgttttggagatcgtagagacggaggatatcgtgagaggcactgtagataagggaggttagaaaagaagttctgcattgtctcatggtcctttactcaccagacaagatgacgcccattcggcatggccttgagtgctgtcaccggcccactcccctgtgggaatttgaacgttcgttcggcagttctcaaacccttgtggagactgtattcctcaacagtgccattccggcgtccggcatagatgtagtttccgtcgggggaccaacaagcattcatacaccatggaggagaattatagggggtgatgcgagcgacaggatcaggctgtcgccggtcccaaactcggattgttccatcgattgaagcagccaggaacgtgttatcacttgtcacaccgtgctcttgttgggtattttgtgagaagtctggggctggtgggggtgtctcgagatcctctgctttagggagtccattgacaagaggttgcactgcgccagtcgggatgtccgcatcgtccatttccatttccgttttctggactggctcatccgtgtgagtatttgtttggttcgacaatgtattctgcgtgtcttgtacatatcccatgtctagttgagcagatatttcatcatcaacttctcctggcgcgtcgacatcctgcatagcaccgttggctacagctttgccaaactcgtcgtcctcatctaccccaaatactcccccggatggctcaccaccatcagcggctccgccatccgcatcaccaaataacgagtccgctccgccaaatagtgagtctgccggggatcccgcctgcgggttctcaaccgggcccgagtctccattgtcgtgagaggtatccatgaagttgaaattgtctgtaccaggcgcatcatagtttgatgaatatgtgccattggtctgttgcgcttcgattgtgtcctgggggactggaagggtggactctggccgaatctgcaaagcagatatttgtccaccgctaccaccgaaagcccgtcgaggttgaccagtattcagatcccaatcaaaaactcgtttatcccagcccccggagagcaatgattcttcatctgatgtgagattcagggaggacactgcagaagtatgttgccgcagaagcgcaatttccttgccctcttcgtggcgcagagtttgcagacggattaccccagattctaacccggaaagcatccataatccttcgctatggcaggccaaagagtacaccggtgacaactgggcgccatccatgttctcccagtatgtcatcaggactccagctttgaccacactatccacgaagggatgcctttgcgccacggttaacatgagcttgctgtttattgagtccgcccagttgaactttcgcacgaatccatccgatccaccggtgaagacccaacgcatatccgctgtcgctgtaacggtattgatcgaggtcgcatgcggtgcggcggtggttgggatcacatcgtaggttcgggctgtgaggcattcagggcgcacacttgggtggtaaatggagaacggttccaacacggagctgtcgccattgctatttgtgttttgttgaatggcagggccttccgacgcctggctcgcgttcgaagggctatcgggatcctgatccccgtccccgtcttggtcattttcattatcgccttcgccatcgtcgacgtcgcgcattgtgtcgtccatatcgttctcattctcgttatcagagcttccgtcctgggagcctagggaaccgcgagggtgattagcaaggttgagatcgatcggctagcggaccattgggacaaagaattgtcataccgcccatgtcacggtcctcttcttcctccattgaagccatgattaccgcgcctctcgtggcagtccgagttgtggggtagctatcgtttgcgcgcagcaattcaaacagggtggaagtttcggacaaacagctccgacacaaaggcaaatgagactaaggctaatggcggtgagattgagattatgccctagctccagagtacaagaacagagagagggagcgttgtgaagtccgcggcttaaaatggaccaaccttccgcggtgggaatgggtccgatgcttgacggaccaatgagcgtcaagagctactatatacaatctatcacatcaatttacattctatcctgcacaatagactgtatataattaacaaacttgctactatgttatatatacatatgtagtatatatgtaggatgttttttgtgatatagaacattcataatattgaggtttgactatataatgtaatcttatatgttagctgcacatcgggaatgcatttcttatacaacactactaggtagtaggcagtgggtatacaatatatcagatatagcaagcattgtctaaactttggtttgcctctctcttaaaaaatatactcccttttagtcgccttcaatcgcttctcactcatgcctcacttagtttcatacacaatccatcgtatgtccacctaatgcgtccagatccgcgcggcctgatagataatattcggcgctggatttaaccccccacgcttgatgccacactctcttctactccttctcatcctacgcattctttagacaatcatgtcccactttcgctttcagtatggtcatagacccaaggaacaggtcagaccggttaatcctgagatccgccagtacttcgacccagatctaccagtctacggcccttggaagctttggcaaactaagcccgagcttccttcgaccgaagagatcctcgggacagacgtatcaggagatattgtcgctcttacccccaattgcatttcggagccttgggtctccaaggagaaatacctagaggcccattatgcattgatccgggaagactcagttgcaccacttcgaaatgccgtggctcgggttcgcgctgatccttttatgaaggatactcaggatatctccatctatgagaaggtgagtactgctctgtcgttggaatttcttggatttggatagtactgaccatctctttacatcaaaggtcttcattatcggtgttaccctagcccgagcgggtttggcgttgcacatccaattctcaactcgtcgtgcgggcaagaatattgcctggacatactctaaccgtcttaatcctggaacactcgtcgcccttacccccaagcgcaatgcattcttgagcaaatgtgttgtcgccgtcgtagcttgtcggctgctggaatcggttgagaaagaccccccagaggtcgatctcttcttggcctcacccgaggatatcgaggttgatccacagtgagcaatactatggttcagtggttttgaaagatataacaatactgactagtatatctcaggcaagaatggatcatggttgaggctcgagcgggatattttgaagcaaatcgacacaccttgacagcactgcagaagttgtcaaaggaaaggtcagcggcaaatcgtatctcccttattgaaatttacctgaccttatctagtttcccgttgaacgaacaaatctgcagcctggaggaagacattgatgcaccaggatacatcaacaccgcgccatccatggacttctcgccattgtccgaagtctctggactcgatgtcacgaacaaatacgacatcctcgagagatggccctcccagccaatgggaaagctagatgcatcccagtggtcagccctgaaccgaatgttgactaaaaagctggccatcatccagggtccccctggaacgggcaaaacctttacctccctcgctgctctgaggatgatgctctcgaacaaagggcccaaggatccaccgataatcatcgccgctcaaaccaaccatgctctagatcaacttatcaagcatatctcggtgttcgagaagaactatgtccggctgggtggaagaacttccgatcctgagattcgcaagcacactccttatgagatcagacagaaccagggtctattgacaattgaggggggcttgatggctccaatgagaaagaaacagaacaaactcgcggctgagcttgagaaggtcctaaagccacttgcgccatcaaacagcaacaagccccttgcagtatctctatttctggagcatggtcttttgagccaagagcaagttgattccttgaaggaagctgcacacaaatggcagcgatccaacactcctgcaaatgccgatcctttggcggcttggctttcagactgcgtgaaggagtttgactccgaatacgccggtgactttgggttcatcgatgatgatattgacctggagtatgagcaactcaaagagatcgaagtcgaacacggaagatatgaggatgactggtcgtctttcaaaacacgctattaccccttgtcgggtggtctttgcagctccaacaccgccaaagtctctcgggcaacagttgaaaatctgctaaaagagaaggacttttacaaaatccacaagaggtatcgcggtgctgtctatggctacctacgtgagcagctgatggttatcctgggagaaaatgtgcagcgcctcgctcaaacctacaaaaaatgcgcctccaattttcaaattggtaggtttgaacgggactactgtattctccaggaggcgaagatcattggaatgaccaccactggtctgagcaaatacagaggactggtctcgagtttgaaaccccgagtcatcttgatcgaagaggcagcagaagtacttgaggccccagttgcagtcgcttgtcttccgtcacttcagcatcttatccttgttggtgatcaccagcagcttaagggtcaatgtgcggactatgaactgtgcgggcaccctttctacctcgatgtctctatgtttgagcgtctgatgataaacaaaatgccatacgccatgcttcaagagcagagacgaatggtgccagaaatcagagagctcgtggcccccatctatgggaatcttcttcatgaccatccgtctgttggagatcacccttttgttcctggcatgggagacaagcgatcattctttttcgaccacactgcgcatgaaagcaacgacagtctgctatccaaggtgaatgactttgaggcatcaatggtggtcaatcttcttgcctacctggtgatgaacaaagtcccggcatccagtatcactgtcctgactttctacaatggccaacggaaattgatcatgcgaaagaaggcacagaatcccaacgtcgccaaaccatacgtcaatatagtgaccgtcgactcataccaaggagaagagaacgatatcgtcatcctctcgcttgttcgatccaatgatcatcgaggtatcggctttctcgcgcaggacaatagagtttgtgtcgccttgtcgcgcgccaaatacggtctttacatatttggcaatgcacgatgtgttagcaaacacagtgagttttggtatgcagttactaatgtgatgtcggagaaaaaagaagaccctcgtatcggcccggctctgcctctgtactgcacacgacacaaccaagaaaccctcatcgagagtgagtccctgtcctgcctagtgatatcaacggaagagatgatctaaccgtttttctagctctcaaggactggaacaccatcggtgacggctgcgacaagccttgtggcacgaatttaccatgcggacatccatgtccccgcaaatgccacgggtaagtttcgcgaataatgacagtttccatgcacccaatactgacatcttgactcattagttccgaacacgactgggtctcctgcaaacagcgctgccgtgaaattcgcgagtgctgtaacacgttctgcatttgtgtgtgctctccaccacacactcacgattgcttctgcggtatgggcaaggacaacaaaacccagatcttcgacggcggatccgactgggatgatgtcgatggcgaagaagatgatcgcgacgaaaaggtcggccccatcccccggacccgagccccaacccgtgcctccgcctctgcctctgtctctgcctccaccgcagaagatacagctcgttgcgccgagggtgtacgccaatggcaggcgtttgcgcgtggtggtggcgtgttggatgattatcgtcgggctgggcttgacgctagcgggaaacgtcctcagaaagatgctattccagttgaacagaacgtggttgctccggttcaaggcactcttatcgacttcgacgatgatgccgatgatgccgatgatggtcaggttgaagttctgggtgcaggggaagacgccctggctgagaggggcatcttcgcacgtgatagtgatggtcaggtcgaagctatgagtgaagtacaagacacgcctcctactctcgacaatgacttgataaacttcgaagaggatgatgatggctaccaagctgaaggtgtgagtcaaccgataatgcggcttccttcgatgcggcttccttctatgttagtcgaagtttcgcttacttccagggtcgaggaagtcgcggcgtctccatttgggggggatctgatcgagctttcctagatgggcggcaggcgtcactttgctatggtttttgcttttgctgggagggtagctcagtgaatgaactggggaatcaggaagataatgggaagaggatgatggaaacagaggaaatgatgattcgggatagcagaaaaatataaaagcacaaaaaaacacaaaaaaggcgacgatcaaagtcgcccacctcatgagttcatgaatacattattttccagagactccaatatatacaaacgccaaacccatagatatgtaatgtcaacatcaaatcatacttatatactcttccaagctctgcccaagaacattaataaacggccactgagtattcgttccaaacaacctagcccacagcttaagaacggccaatcccaaagaagccggttccagatctggcggcgcctcgaagtcatctgtatcaatagacgaatacgcttcttcgatgatacagcgggtccagcgtaggatacgactttcgttttctgcagcattgttagccggtaaatcatgcagcaggatatggacataccactcaacgactgatccggtcccgcctcggcaagggtaaacagccatttgcttagcaacactgtacattctatactggctagcgagtgccgcacgctccagaagaaggcttgactacgagcaatgtggtctatgcccagacgcacggggatgctgagagcatgagcggcgtatatgagtgccgggatgagacggtagctgcgttctgggcgtggggagtgacagagtgctgtggctattattatcgggtcgcgggtctcaaggcggcgatgaggtccgagatttagagataggcggacgtaagcgagtcctaggaatgcactggaggtgaatgggattggaccgttttcgttgtgtgggtctagactggattctggggcttgttgccatacagaggtccaagaacggagagctcgtctatgggttgaatcgttagaagtgagtctaggaaggtttatgggtagaagacttactctagtttattcagttcctctgttgggagagttgtggaatggtttccgttcggtaatgataactcgctcacgagatggattcgttgcaggagtccgtgtaagaggatatagttacccaatggagccgggatggggtctagtggtttggctgatcgggacttttgcaagaggagggtcaatgcgtcttggaagaacaactgctggggacctcgttcttgctgggctgcttcccattccgcggcggtgcttgcagtccattcaatggtagaacacggaagacgcaggtgtatctcattgctgcgcaaagatggataagcattgtatgcgacactgtgaacatggataaagcagaacgcaatcaactttgtgcgtcgcgccgattcttggtccgcccattcgtaccagtcgaggggtgcgcgtgggtcagagcgtgttgtgtcttctgtcaagccagcctcacggagatgtcgaaccagcaagccctgaaggtggaatgcttcttgtaccagtctggcattttcccacgtggagtagcccatcagaataaggagacagcgggtaatttcgatctgcttccaaccagcagtagtttccgctgttacctgcggttgcgtgagggattgatcgccaaaagtggaataaggagatatccccagcggtactcgagggcctgaattgtaccctggcttagctgggaaatggggctctctggccattcgttcaaatagaactgccttggaaacgtggaataatctttctgcgttgcggtgctcaaatctatactgggctccgatcgtcatgatagcaagaaccacctcaggggcacgttcattgatatagaaagtcgggatatggataaacggaagatgtgggtggaatccttcaaaataggaagtaagataccgagtcaatgtgtgacgagatggcagtgcgaaatccggaatcacatggcgaaattcttcgagagatgctgcaagacgaaaccgctgctcttcggtgacattgaatcgtgacggtggtctcttcgcgtttgggggcggttctagaatgttgtcagtgatctacagagtgatagcaatacaaggtgtcatataccagaatcagacagggttccaaggctttggtcgcccctgggcacagatggaagccaggatctgaatggtgagtcgcctcgagaaccatctccacttcgtcgtggccgctcatgctcttgggtctgtcgacccgtttctcttacgtcttccaggttaacctcttgtgtttgagaggtttcaccttcactgggaacccattccccaggcaagccaatcgaatccaagaaatgtgtgaattcctggaaatgatttagatcttcgggcaagtagggcatcggttgtcctattttgtgtcagattaatagatttcttataatggcagtcaagcgaaagaccaggatattgcatattgcatattgcacagaacattaggagggatacttgaacgacaaagaaaacaacgtacctgtaggtcgataatcgcctggaagaagcagctgggcagcttgaagcatatccggatcatgcaccatacccgtatggggatcaatggctgggtttgggactcctgcagtagcagcgggaagcatgccggcctgatgcgggtctaaataaggcgtattctgtgccccagcccattggtgcacagccgatgaccctgcaagggattcgacgggtacgggccgagttggtgtatcatattgcggcgggatagctgcagggtgatgcgttggctggaaatccgccttggtttgctcgggcggcgtcggcgaagtcagcccatcttgatgtgagatgcgcgtatgacgctttaacagatcccttctagtaaaggccgccccacagaagcaaataaacggcttctccttggtgtctattttaccgggttagcattagctgtggggatttccccgggttttgcttacgggtgcgaatgtgtcgctccaaatgttcagtccgccggaaactccgaccgcagtgtatacatatacgtgcccttgctccacgggcacccctgtgcggctggggtgatggagacattgaagggggtatggagaactggtttggagaagaaaaggccctggttgagcaagtggatgtcgagatgggagattcgaccccaactcctccaactcggggcccgccgggacgttcggcccgcgataagcgataagggaagatttggagatgctcggcagaagtatagaggcatggagttgttaatgtcatattcagatgtttatcgctgttttatcctattggaatggtctaataactcctgaatacgtttcctggggttgtggtaggtggtcacgtcacatagtggctcgttacttcatcatcctacttactccgtacatactgtcattcttcaaatgtcctactataaagtactctaacaaaccagtacatgtctactttgtagtgtatggatttcacgttggatacaacatctaccctaaatctaccgaacgtcctcgaggaagctcaataggaaatccacaataccatcctgattcccatattctagtgcgatcaatcgttagaggaaaagacgttcatatagaaatatagaatttggtgttaaaagttaaataacaaagctgtcaaatcctcaaaatacaatctcactggacttctaattgcacatctcggcattgtggagttcacaagagcagcgataacggaaccttggaatgtcgtaaatcgagaaacggaactcatcgcgtaaatgagcaagtcagcagtggaattgtctgtcagttggagaatgccgggatgaggggcttatcttccccgccttcttttggtccggtttaaaagtcaacctcccctggcaatttccctcccaattttgaacaatcattcaataatggcaccaaagcgagttctcattacctacggtgtagatgttgatgctgtagccggttggctaggctcgtatggtggcgaggattccacaaacgacatcagccggggtaggtttcaatgttcttttctacattctgctcgctaacaatcaattaggatactgggcagggacagttggaacccaacgattgttgaaactgttcaagaaatacgatatcaagtcaacatggttcatccccggccactccctcgagaccttcccggaggacatggccgcagtccgggacgcgggccacgagatcggcctgcacgggtattcccacgagaacccgacggacatgtctctagagcagcagcgtgacgtgctggacaaaacataccggatgttgaccgagttcgctggaaagcctcctcgaggaagcgtggcaccctggtacgagtcttgaatttagatttagcaatggtgctaatcagatacaataggtgggaaactagcaaagaaggagcccagctcctccttgactacggcatcgagtacgaccacagcatgagccacgaggactgccaggcttactacctccgaaccggcgacacctggactaagatcgattacaagcagaaagctgaaacgtggatgaagcctcttgagcatggatccgaaacagggcttgttgagatcccgtccaactggtatattgacgatctaccgccgatgatgttcatcaaggacgcgcccaacagtcatggttatgtcaacccgcgggacattgaggatatctggcgcgaccattttgactacttctaccgcgagtacgatgagtttattttcccaattactatccacccggatgtgtcgggaagacctcacgtgctgctgatgcatgaaaggtatgatgtgatcataaatttgtgcagagtagggctgacattcgataggcttattgagcatttcaaaaagcacgagggtgttgaattcgtgacaatggaacaggtttgcgacgacttcaagaataagaacgctcctccgcctggggccttgatgcccgctaaggctggtgcgatgttggagaagtgaacatatcatctgaggtattaacagtatattatcacagcctcttagttggactacaaaatctatcaatgagaatagcatttgctcgtgtcaatagtttatcccgaggtccgttgtggtcaaccatcaaatgacattaccccaaatcaatatacggagctatcagcgctaagataactagagctatcggatagttaaactgattcgaagatctatggatggatctccacgtctctattatcagaaatgtctaccccaacatagataactgtatcctatgtaccccaactatatataccccaaatcaagtgctgtgcaaccacccaatcatactctatcgcggacaaggcaggtcattgataggccgattgatacaaatatcacaggtgtatgtctacggcgatctatatgattgtcgcggcgtcgagtataatcggcgtgtcgataacgtccaatgctccgttgctgcattttgtctgggctgtcaagttctaccgatcgggaagatggccattaatacggatgcaaaatcgcgcaagttctcatatatcgggcggctcacgtagcttggactagaaatggttatgcataagtcgaaagaccacccgaaggctagatatcttaacgtagcatgagcttggtaaccgccccctatccttcagcctagagataagcacctctagatagatcgtgtcggcggtgaaaccataaactgatcgcgtacggcatcatgcttcgagacctgatcatcggtaaacagcgtgtgtgcagcctatctgcagggtattgccagtggttagctgccgtgcacaacgggatcttggcttggcgtatgtcttggcgcaggtgggaagcttgtactattgcgccactagcgcttagccttgacaagaatgtaaatccgtgctccgtctatcgtaggtcattggaggaataatgaggaagttcatgacctccgctgtcgggtcggcaaaatttgcagagttatcaacgaggggaagttccacgggtgcgttagaccatgatctattggctggcattacagcgctatacacggctggacggatagacccttaaaatgagaaagataagggcctagaatgatgctaaagcagactaaaccggactaaaaagtaccataaagtgtgcgaggacctccgtttccgtttccgagtgtgaatccacgtgctcctctttgttcttgttatctcttaactagttcccatttccttctcacttactcttcttcttcttctgtatacctcatatcctcttgtccagacgaaaaagcgcgttgatcttatcaaatttccaccgcgcgtctacgttatcaccgggtctatcagaagatggcccgcaaactggccctgctggtcatattaatgcacgcaatccaaatcctcgctcttcctactccctacgaaaactcgatcgcattcaaatccgttctgtctggcattacacaaaacaatcgccactacttcccagaaaccatccccgatcaagatgagctcatagtcatgctgaaggagacagccatgcgtgaagcaggcttcgtgctctcgtcaaacccggacccgcaatcaaaggagcataaaacggagacggagcttcacaaatcacttccgaatccgtatgcagcgatcggcacggatgcaacggcaaaaccacaaccgaatagctacccaaagccgagacaatccaagtccaagtccgagtcccgtgtgaaggagtctttcgtggtcgcattaggatcatacaattacccgatctactggccgccatttgggttcttcgttatcgcggctgcggttgtgtgtttctgtacgatactgcgggggatccgcgcgaagaagtgaagaatgcgacatgtgactgtcggattaatatttatgttgaaagactttcttttttctttattcgcttctctacggagagaagcgagggattgattctaccaaggctatgcggttacccgttcagccttgggagctctatcctttctccactcggtcggaggcttgtttgattacggtgggactccaggccccgttccattgaatcgaatcgaccctatccccgataagcgatttgaaatacgccgcgaccgatggggcaattctagcgctgagatcagagccggatgtatatcctggatgactcgggcaatactccgtgacgaatcgttcgaatgttcgtgatccgaccacctttcccgtcccaactcgcgacgagcatacgacgagcaatgcgaatgccagtcgaggagatatcgaagatggcatctggaacttgccgaagaagaagcagcttgggtgttgaagaagtggcaggcatgttcagattgagggtgggattttcatccctacatgcctcctgtgtcaaatgactacatatttgttctgaatacaaatactttgatgaatgctacactaaaaggaaaaactacaaacttacctagcacatggcccatagtagtaatggtataccacaagtaatattgcaagcattttcattctctaccagaaacataaattccgacatgtgccaccaagaatagacgtaaggttacaagaagaactcggaaatgatgtgatagcaggtacatgcgcgaagcagaaaagaggacaaaaaagacaagaaagcaaccgaagacgccacaccggtgcgagagtaagaagccagagcagaaccatgataacattggaacagatgataatgatgataaagcctcccggccaggaaatgatgattacatttgtgtctctctcgctctcttttttgcatccccgccccgaggaatgagcggggggtaaaccaataacaggtagtagatgaagtagggggtaacaatgaatatgtacgcgagagattctatagatagggaaaggaaagaagaagggagccggtgctttaacaatcaccgacaagacgcttctgcgtccaagcgcgttgggctccgtctagaagaacgtccatgttgccgctgttctcgcacatgccgcggaagacgccgtcttctttgttaatgagggtccaggggtggtcgtactcgacaacgcggccgtggtcaaggacaaggactttgtcgtagtcgatgatggtctgcagtcggtgtgcgattgtgatgattgtgctgttgctcaattcgcggagggtctcttggatcttggcgtcggtggcgtagtcgatggatgcggttgcttcatccatcatcaagacgcgggggttcttgagcaaggcgcgggcgaggcagaggagctggcgctggccttgggagaggttggagccggactccgagacttggctgtccaggttgtggaagacgtttttattatcgactactgtcactgcgctgctgttcacgccgctgccgttgatttccgtcgcggtgcgactgcttgaggttgtgggggttgcggtgcctgaggtgctggaaccgataaggtgcacgcgacggagagctgtgaaaatctgttcgtcactgaagagaccgaagggatcgaggttgctgcggagggttccggtgaacagggtcggatcctgggggacaatggtgattgactggcgcaggtcccgcagtccgattgacccgatgtcaacgccgtcaatgatgatctgacccttctcggcctcgagaccgcggaagagagccagcgcgagagaactcttgccagcaccggtgcgaccgacaatgccgaccttttcggcagcctttacagagaacgaaacgtccttgagaaccgggtccagatcgggtcggtaccgagtagtgtagttaatgaactcgaccgcaccttggctgggccaatcagacgcaggtcgtgagtcttcgatgacagaagctgcttcctggtccacattaaggtattctctgacacgctcgacagagttcatgttttgctggacctcggagtacagacgcacaagccaaaggacattctctgtgaatgtgacggcgtaggtcagggaaagaccggcagcaccagcatcgatcgttccaacgttcaataacacaaaggtagccgagaagaacgagactagagcaccggtccaatcaacacggagggcgagccagcggttgctagcccagaggtagatgtgtggccggttgtaggcattgatgcggcggtggttgtcgaccatgaagcgaggaccatcaccataagcacgaatggtgacgataccgttcagggtctcaccgaactgctggtacaagggactgcgctggacagattccagacgcttgaggtctcgcgaagagttcaaataaacagcaccgagggcagtgtacaccaaagtgatgaacacaccggcaatcaagaatcctggcgtgatccacgaaatcagaatgacaatcataatcacagatgccagactgtggagcatgccgatagcaacaggagcgacttcctgatcgacagactcaacatccttggagaaccggttcatcagttgaccaagaggcgtggagtcaaagaatctgaactttgcgtgcatgactgccctgagaaggcgatcatgaatcttccatgatgcatggagcgaaccccagaacagaacagcttcccgagacaaagagattgcgatatagaggaatcccaggagcgcatagacacccaggtaataagccacgttcacctccccatcagagttgccggaagagcttgcgccaaattggggcagaccccagctgctcatgcgcccaacacttccaatgctgaaggtagggggtttgagatgggccgcggcggcgtactttccgacgtcctcggcactatccttggacgtatggtaagaattcgcccactgtctgatccagatgttggtggaaacagaacccaattgctgcaagacgaatacaacaacagcaccaacccaatagtaccacgggcccatggcacggaggtacatggtgacagtcgaccacttgacactaccagtagccttagattcagtgagtttggccttgtcttctacctttccatttggagtgccgttcaaatcttcatcatccgattcatggttcgatggggcacgggagagtccacgagagctgggtcgggaattgggtcgagacttgaggaactcatcgcccaatgcaccagtagcggcgacatcgttgggacggccctgggcggaaattctgccgtgctcaagtaccacaacgtgatccgattgggggacagtcaaagcaacgttatgggttaccaaaatacatgtgcggttgaacatcagagggccggtaagagcttggcggaagatgtgcttggcggtatgagagtcgacagcagagagacagtcatctagcagcaagtggcggccactgctgtagatagcgcgggcaagagagattcgctgcttctggccaccagacaaactaatgcccttctcgccaacaagagtttgatcaccagcatcaaggatagcgaggtcacgttccagggcgcaggccttcagcaccgcacggtagcgacgttcatcatagggagaggcgaagatgatgttttcctttacagtgtcgttgaccaaccaggcttcctgggcacagtaagcaatgctgtcaaccagaccagtttcagggtccactgggagatctgccctgttgggcattccaccgggaagatgaacacgaccctcgagaagtttcatttctccaagcaaagccatgagcagggaggtctttccagatccagtcgggccaacaatgatgttaagcttgccgacaaggaattcaacgtcgacattgatcagacggaaagcctccaagtcggcatcagcctcggtatcttgggaatccccactggagctgttccaagatagcgttgccttttcaagaccaatcctggcaggtgttcctgtgacagtactatcacggagctgatcgtatttgcttgtttcctcctcgttcaagtacttgtccacacgatctagagaaaccttacattcctgaacgtgtgccaccatatccgcgagctggtccaagggtacccgcagcaaagagaacatggacaaggcagggaaagcgatcgaaggggtcagttgttttttctcgacaacagtatacaagaagaaggacatgaacgtgatgagaataggcgtgccgtaccagacggttgcggcggaggaccagaggatgtatcgcttgcgcagggctttcagttcggtcttgcgcttctcgccgacaatgtcttggaaccgctgctcccaagcaaagtacttgatgatgcggatgttttggaggacttcgttagtggcgtgaatacgggcatcggtgcccttcaaaatctgattctggaccttgttgaactggcgggcgataacaaggttgataggcagcatgagcgccatcaaagcgataccggcaaatgagctgaaacccatgatgtggtagagcagaataatcgccattgtaatctgcactggcacactagcccacaagaagtggagataggcaccgacctcgctcaccttgaacgaatcgatcgccatcaagttgataattgtgccaacattggcctgtgtaggttcctccgcaattgtctctggcttgttgccagcctcggcatcatttccattggcggcctgcttcttgcgaccaaaggaaaagagctttttcttcttattcttgattggatcttctacgggtttcttgacctccagtgaagcgcctgccttgcggcgaagagccttggcataaatttcaccaataatgatcgcacggattttcacgcccatcttacgaccaataaataaggcctgtccatctgcgacaccctgaaccgcggcgcaacagaagagcagaatggcgaacaaccaagccgcgctgggtgtggtcgaccgaggatcttcgacgtactcgaggatggccttgaggagtagactaggcatgaaaacgaatagattggcgaagactgtccaggcaccctgctttagaattgtccccataaagtaccggatgagcttccatgccaaagagcctttcatttgtctcttgcggaattctctaagcacgtgcgcagccttctgagacggggtcaggttccaaacatcctcaatctccaggggttggcgataacccttcatgaccaaaggatcgagccaggcaaatgtcgcaagagataacaaactggccatggggtatgttggaggctccaagccatcttcgcgttcaaccagaactggcttattgcctcggcgagtggtgagcgcaatgagcagcaacaccgtactcagagcgaactgaatgctgctgaaaatcagggcttgctgggacacggggtggataatggcggatcggaagaccatgatgttgaacaaccactggaagctgtacagaatcgctgtatgggtccagattctcggcgcagaggaaaggtccatggtcgataggaggaaacggaccagcaccaagaaaaggatgtaggcccacgacacaagcccagccacggcggggagggttccatgtcggccccagccgtgagtcgacaaaacggcgatatagaccccaacttgagcaattaaagctgcgatctcgagtagtacaacggtgatctctccacgcgggcgattgacctcgacaatctgagcttgttcttgttgtacagcttggaacaacatcgtatcggactcgttttcctgcgatgcactggggacctcatcttccgagtcattgttcgggagaaccttgtaagcgacacctttttgagtgaggatatatcgatgagcgaggcggattaggatcaccagcagcgaagtgccgcagactgtgaggggaagtatgacctgaagaacgctattaagatacctcatgatcagcataaaatttcaacgatcggaattgccatcggtgtagacacacttgcgctggaagcaacgagacaggtcgtcaatggcccagacggggccttgacattgcggtaacatgttgaccgggaagctcgcagaaactgaagctctcggacctcgcgcgactcgatcacacagcttttcagctggcgacagtgatgaatgggtaaaggcgaccggtattcggttattgtgaactacccctttagcaacaagacttgactgaaatgctggacaaggctagcattgcaaagtcgaggtgaacagtgacgctgggataagggttccgggaccgagtgccgttgaggcaaaagagtaggcggggaaggctactcagattctgccgagcaagaatcaccgaagatgttcacgagggtgttgagatatggatctaggggcgggggaagaatcagagagtgaaaatgccaaatgttccaaaaccggcggtggacggtgaacggactccggtaaagggtgacattagccaccaccaaggtttggtggtggagtgaggtaccttatacccaattaacagtattttctgcatacggagtttttatcacaatgccattattgacttaactccttcgggagcccgatgggcaataattcctgcaatgtctcaaagtattcatctgacctgtctcaatcagcttatcgtgctccactataaaaggtatcgattttatatggagttacaacgaactcactacaatatgtatagaagatgtccaagtattcaatcaaaatacgtacaattcagtatgtatcagtggtttatccactcttcctcctcataaacgcctcatggtaggggttcatcttaagccaagcgtctggattgaaaacgcgaccagaatcgagataacggagttttgttgaggctttgctacatgccagctattcttcttttgacaagggcgttgctcacctttaggtatacacaaataatgagcttcggcggcggctttgctactgtctacaccctccaggtaatagtcattctgactcattcaacagccgtgagatcttttgcattaagtgcgtatttagcatgaatgatgaaccattcgaaactaaataggtcagcaggttttatcttgaactgagaagcagaaccgttggtagaacagtaggggagctcgatgacgaatcaatcacatcactacttacctacccctagagacatgtctctttgaatcttgttatatgtatacaaagcgataaaaagcataaatcatacagtactttactaaacatgatcagagatatctgataggaaaaggcctctcgagaagagtcactcggttgccttggggtatcgctgcaaccatccctccctggtgaatcgctgcccgtgcgtagcgagaagagcttcaattttcgcttgcagttctttatgtcattgtaagtcagtacttgtacttgtattagtagaccatattattagtaccttcgactgtcatctccttccgggcttgtagagagtaatggtcgcgaaattcgtggacaagaatgaggtcgtcagggagatgggttcctgttcagctcagtcaatactgcgtagggggaaagtcttcgaatgacccaagagaaacagaccagccataatagcatatatgtaaatagtgagaccaccccaggctttgacagtgcgaacgaggttctgctgtgtcctagagttggggcgcatggaagccccattaggaactgagatagattagcgacgtgagctgatcgttttgactatcatgaattacattcataagtggctgggttgagagccttcggttgtacttttcctgcagttgtaagaagatcgaatacgccgtgtggtcgtcgtggacctggccaagctcggagccggatggaggtgcctgagttaacgcggaatatatccttgggaaaccgagtgaaggattgaatgaatctgttatgcgacatcttgatatatccttgcagggatcaggcgagggtgtatcgagggttgaggtaagatagcaaagttgcgaacttagcaaccccgggaaggtcacctgcaagggcaatcacatcactgctacggagtatacacgaattattctgtagttaaaaaagagatgagtattactatacaccccataaccccattttttactttctacacacctttctaaactacggagtacttcgatattcatttcctgagtctatttttagagattactacttaagagtgtggacaagaataactatataacatctaacaaagacagttaagcattaatttaggtatgagaatcaggaattcaagcattaagagttcgacttatgaatcgatataggaattaccacattgtatactccgtagacctgaggtggcgggcatagtggataaacgcccctcttagtcaggttgccactgaaatttcaggcatccgttgatctaatcagcatcggcctcgcctccccgtgatcccggcattgcctacggttttataattcattccgctttaacttcaatttgctccatttgcataaggcacatggtgctgcctcggcgtcgtatagctatataaggtagattgctcccttacaattacgagcggaatctctccaggtgcaactcttcagatcccgcttatctcgtcatggcggagcgcatcctcatgaacgaattcaagacccttctcaaagagaagtgggttaacgttcaggtcagtttaccacttcacaatcgcctttgacacttccacacttgcaggttattgacatactttgtgtagttgcacgatgacgacatcttcaactgggatgttgccctgatcgtgatcaacccggactcgatgtactacggcggctacttcaaagccgcaatgtcattcccctccaactatccgtatgccccaccaagtatgacacctcctctcctccttctcatcttcaaaataactgacgagattcttcttaccattagagttccgcttcctgcagcccatcaaccacccgaacatctacaccaatggcaaactatgcatatccatcctccacgcgcccggcgaagatgaaatgtccggcgagcttgcctcagagcgctggtctcccgctcagcgcgtcgagtcggtcctgatctccatcatctctctgcttgacgatgccgagacttcctcccccgcgaacgtcgacgctgccgtcttgctccgcaaagacccagaagcctaccgccagcttgtcaaggccgatgtcgagaagtctaagctcgatattcccgccggcttcgagatgccaacacatgatactcccgtccgtgagcccgtggagaaggaagacgatgacttctgggccgatagcgatgccgacagcgacgtgttcggtggcagtgactctgaggatgaactcgtcatggaacagtccagcggcagtgatatggaggaggacgaggatgagtcggccgacgatgattccacggagacaaagaaggtgtgatgataactttctgcgtctttcgtctggggaattgttgcatgatcagccatttcaggtctgcttctctgagcattttcagcattctcggcgtgcccttgtcatctttcatacgataggcgtttagcgggatcattttcgaacattatgggtcttatggtttatgataacatgcaataccctaatgttgcacagatattttaacgaatcaaatcaaattctaacatcaagatcgactctaaatctctatcacatctctatcacactttcaccctacctacgtccttacttcagttcagccaagccataaatcttctttgcccagcgaaagtggactctcctccgcctccccacagtgcccccacctataaacccaagcatttacggttccaatatatgacaactaacttatccaaatatcatatctaggtatatctacttacccactgaacccaaccaatcccaagatggcaacccaaaacctcgccacctggacagtctccctgtcctatcccgacctcccaggggaagtaatcgacgcggccgtccgaagcttctacaacatagccgggtgcatagtaggcggcagtcaacacatcgcaacaagcacagcccgcaaagccctatcccccttcgcaggcccaccaacctcccacctcccgggcacaagcacctccacagacgccatgcacgcagccctcttcaacggaatcgcctcgcacgtccacgactacgatgacacccacctggacacagtcatccacccaacggggccggtagcatgtgccctcctcgccatcctcccgacgctcccgcgccccgtttccggaccggagtttataaccgctctggtggccggtatcgaagccgagtgtaaggttggcctggccgtttggccggcgcactacgatgtcgggtggcatatcacgtcgacgactgggtcgattggtgcggcggtggcggtggcgaagttgcttgcgttgtcggcggaacaggtcgcgcatgcgattggtctggctgctacgcaggtcaccgggctccgggagatgtttgggtcacatgcgaagtcgttccatcccgggcgagcggcgcagaatgggttgcttgccgctttgcttgcgcgggaggggtttacgagttcggttcaggcgttggaggcgaagagggggtgggcgaatgttgtttgtgccggcgggaatcggattgaggaggaggttgcggcgctagggggtggggggcgctgggagactgtgaggaatgcgtttaagccgtttccttgtgggattgtggttcatcctgttattgacgggtgtgtttggttgcatggggagttggggcgggttggggttgatgcggcggatgttgaggaggttgttgcgagtgtgcatccgcttgttctggagttgacggggaagacggcgccgaaggatgggctggaggcgaagtttagtgtttatcatggtggcgccgtggggttgttattagggaaggctacgccggcgcagtatgaggatgatgttgtacttgatacgcgggttgtggcactgagggatcggttcagggcggtttctgatgagagtttgcgggctgatgagtgtcatctcgttgtgaaggtgaggggagggactaccatcgagaagcatgtcgactatgccgtgggtagcttggagcgccccatgaccaatgaacagctgacagcaaagttcattgagcagtgtgttggggttctaggagaagagcggactgacaaggcgagtcagtggtgttgggcgttgaaagaacaggccaacgtggctcaaatcaaagatgtgctgtagattgactatatgttggtacctgcatatacttactaagagtttaatgaacctagttatcttacagtgtcactgtgtaatgccggacaaatattggtttgataaatcaacacgtattctatatcagtccgaacttatggttgtagacaagtatgctacgtgaagcaacaaaatagcaaaatagcaaaaacaatctgtgtataggagcgtaatagcggtataaacccgcggattcgtgttggagaatccaaaaaaccgagataaaaccaaagaaaatatgttgtacgcctgtgttaatccattcatccatgcccaagttgttgggtttgtcgcagacagaaccctaacaacgttctaatctatgcagagacagcatccttgatctcgctgtagatagcgccaagctccttgtggaaagccttctcggcgttatcgatgatgctgccaatgcgctcctcaacactggtctcatcctggtgggccttgtagccacccttggcaagaatctgagtgaagttggcggagccaccaccgttccaggccagaagctaatatagagttagcctaatccatgcttttctagatatggtgggaaacttacgttgggggtgtcggagggaatgtcagtgagtgtgccctcggtggcgacgctgataagagcagccttgagctgcttaggggtcacatcggcgacggcaaaggcagagtccttggcgggtgccagggagacgtagtaggccagcagaccggcgatgtgaggggaggccatggaggtaccggaaatggtgttggtggcatgctcgctgccaacccaggtagagaggatgttcagaccgggagcgaagatgtcagtgcacttgccgtagttggagaagtaagcacgctcatcagccagagtggaggcgccaacagtgacggccttctcagcagcagcgggggagtagttgcaggcatcagcgttgtcgttaccggcagcaacggcaaagtgaataccagcgtcaacagcggcattgacagcgagatccagggtgcgagagctaccaccgccgagagacatgttggcaacactgcccttgaacttcttatcgcccttcttggacttcttgatgtgagcctcggccgcccattcaacacccttgacgacatcggacatagtacccgagccgttagagcgaagaaccttgacagcgtagacgttggccttcttggcgacaccgaacttcttgccggcgatagtaccagagcagtgagttccgtgaccgtttccatcctcatcggcatcaccctggggaatggtctggccccaggtagcacggccctcgaagtcaacgtgcttgatgttggtgccagtatcaataacgtaagcatcgacaccctcgccaccctcctcagcatacaagtacttgttgaagttgccgaaggagaggctctcacggtgagagatacgggcaagaccccagggggcgttcttctcaacagtaccctcggtcatggtacggacttcagagtccttctcgatgtaatcaacctgttttgagttatattagccgccgaactagggaacttccgcgagggaatgggattactcacatcaggatgacggcggatctgctcaatgacatcctcgtggaagtgaccagcatatcccatgagtgatccagcaacatggaaagtgtgcttcaggcccatgaaagcctccaagtcggcatcgaacacggagcgcttcttcagctccatccgaccggtatgagcggtgtgcacctcctgcaaccagctctggtgagcggacgcagtgctttggtcaacatgctccttgaacacaatgatgtaggaatccgggatatcctttgcagtcatggaggagaggataggagctgcctcattgtggatggagcctacttgcacgggcgaggcagctaccaacaacgggagcagtgtcaggctgaggaagcctttcatgatgggcaaagtgaaagattaaacacggcggaaggaacaggtgatggagaaacgatagttgtaggtggtaaaggatgagtgaaggataggttggatggagaggagaaggagaagatgaggagaagggcaggcttatctagggaggagacggaggatcgatgatgcaagcgggcattacatacgatacggttacgccggcggatgacctgtcgctgtcgatctagtggagaacatctgagaatggggtacccgatacggtatggtatggtcaccgtggtctcgggaacctcaggagcatccacttgacttgccatagcatctatatcagacttagcatcatatgaaggacgatttaagtgggttggatatcttccggccactataataagtaaatatacggtagctatagcaaggtagtgcagatggtcatcttccccccgggtacctggcagtatcatgctgctataggctataggcaacccccctcgcacggcccagtttctccaaggcaactcatcctccgaagtcgcgtgctttgtgttcggatgactcaaagggttgggcgaatcccccttgtcttgcatgaaagtgccattattggatacaacttggccaatctgcggagaagccatcacatcataggatcaccactcccaagcttctccacatagctcatagctgcgtcttatcgcgcttatcacgtcctatcggtgatcgcccgtaattttgaaaggttaccgtttttacaatacaataacagggctgtgtccagccccgtccagcccccgttccccaagggcaccgagtcacctgatatccaactctcccctcccccgatagcgaattacagcggtcgccgaatatctggcatggggttctgcggatgacgagtgcagcaaattttcctaaccgccaggcttcctattttggcacgagcactgtcacacaccaatgcagaccgttgtacccgatattgaacattcacggtctctgatggtcatacgccatcggagcggacgtggataagatttggctatggctccgtcggctcccctccaccctcccttcccttccgaatcaaccgatcgattggccgaagagctagccccaaccattgaacagctcaagagcgtcggtgcaggcaccgcgatcactctgcctcaggctctatcgacgaccgaatctcttctccgcctccgccacaccttcatagatgatgcacatccacgcaccgccaaagatgcattccgacacctccagggctttcaaacgctgctggcactggcggaccaggtagccgagctctacgatccggtacacaggtccaaggaggaacggaaaggcctgttggatatcttcaaagatgtcctcggggtattggcagagggcttgaaggaccattttggaaacaagcgatattttgctcggaagatagtagggggaggtattgctgctctggagcgaactctggctgtgctagtcaaaaagatagacacaactgagggtgacgcgcatcatctctacggcgccattttggccgcagctctatgccaggagacagtgtcgggtatttttgtaacactgagcaccaagtttccgcaggataaggactctccttccccagaagacgtccaggatgctgtggatcattgcattggatcagccgagacagtggaagtcccggaactacttggaccgttccttcgtgtgtggttgatgcactcctctttgtcggctggatatgacatcttacgcctggccttacccgcatgtctttgccaattggcttcgcagtctcggaggaatgtcgtagccttgcatgccactgatatgctcacctcaatcctaccccttttattcgatggtagacggtcagacaaggagaaagcgatttaccaacatcttactcaatctctcagcgtcctgggaatgagtatggacgatgctggcttcttataccgcggagcgcatggcaacccacaagttctaaaagtgctattgtctgctcttaaatcctctaaggagcccccatcaatacagttcgatatgtctcgtcatggatactgttcagtcgagttcgcaacacttggtcggccatttcctcctatcaattcctccggctacactcttgcagcctgggcccgttttgacgagttcgatcccaacacgcatactactatctttggagcgtttgatgcaagccaggcatgttttattcttgcctacctcgaaaaggatactcggaactttattcttcaaacttcgattcgaggttcccgtcctagtgttcggttcaagtctgcaaaattcgagccgaatcgctggtaccatatttgtgttgttcaaaaaagaccgaaaccaatgtcttcttcccgcgcatctcttttcatagacggcgagtttgttgaacaactgaagatcgaatacccttccgttcctgtaagtcatcagtcaagcaagccatcgcgcgtgcaggcattctttggcacccctcaagatctagcaatgcgactcggaaaaggcgtgtccacttcccgatggtctcttgccaatggaatgcttttcgacgaggcttatagcgatgacatggtagctgttttctacaacctcgggccccggtattatgggaatttccaggattgcttgggctccttccagacatacaaggcctccgcaactctcaacctgcggaatgaacatcttcacccaggtaaagaggaagcctcggacattgtcactgccatccgtagacgagcaagtacattgattcgcgaaagctcgattttgatcaatgtctcttctgtcgccgttcttgatgacgacgatagcaataatgtcgacgaatcacagttgataaaatgtctctcacggcaggcagcaaagagtctgcatcagctaacaaagtcgggtggcaatgccgttgctctcaacggcgccactccggctatcaatgacggcttaacacagcctcagggggtaggtatcctgactggtgatcctgtcgttgcggtacctagggcgatggatgacgctagttggtgtctaggtggctgcgctgcggcccatctaagcttgatcaaggcggccagcaccgcggacggcacccgcatggccgtggaagctctctatgaagcagtgcgggacaactggagaaacagcgaggctatggaaagagagaatggctatggtattcttgcagtcttattgcgggagaagcttggattctgcatgggcaattctccgaccgcgtttaaaatccccgtggttacctctgatacccaggagctgtcatccttaatgcttgacctgttacgtttgactctcggattcgttggctacgatttcgaaacccccaatcactccatcatcacgaacccgctcgcctaccgtgttctactcgtggacatggacgtctggcgactcggagaatctcaggtgatggggttgtattactctcaattctgcacgtttgccgccgatagtaattatcgcagattcaacgccaggcgccttagtcgtatgcgtaagtttgcttcctcatgacaccacagttcttacctcaagctgaccaaactaggtgtcaacaaaaagttactggaaactttgaaggaaggggagctgaccgaagagtctctccaatcttgcttatcggcattccgctcgttgatggagagcagtccctctcccgaccttcttcgatcactagctctgtccatcacatatgcactccataagccaaagaccccaacaaaccttcagagaaagaagagccttcggtacgcggctacatcgtctcgacctgcgtcggcaacaccagagaacaattatcttcccagcgtgactgtgggcattgcaatgctacgggtgtactctgccgtgctgtgtaacccacatgaccctacggcattgaggaaatttgccaaggccgtcacaaacaaggtatgtggatgatcagttgccttggagagagttttgtttaatcatctgtgcagtggcttctttacctcatgtgcgaggaagagcctgaggttgtgatacttgcaacaaagattctggcccgcttggtcgtggccattggcagtgcatacagcaagaaattcgcggagaagagtggtggatacatcattctagaacaccgtctgaagagatgctgggatgttcccgcgttgtggcccatttgcttttctatctttttcggggttgatcatgctttgctggatctcgacaaatccctcaacgtatccgagctgcttagagctttcttggccgaaggcgatgtaacggtcgtctttccggatatgctacccgttattatgaatatgttgaagagcggggtgcgcaatttgactatggcaagtgatgcgcaagaagatactcaacgctctctggaagagcgtgcctctaaatgcgatgaactaaaaatgaacactctcaagcttccaggtaggctctcgttgctcatgactaaggtctggggttactccaactaacgccgttctctactgttagatgctactccctcagaccggaatatccatgggtttgctctcatcaattcggtggttcaatttttagaagaagcacgcgctagatcaccaagcttccaggatttcactgcacaatcgacttacgtgcaggagctactttctgtggtctatcccgttgttgtcggtgctgataccgtcagccccagcgaagaactaaatttccgacagaccggactcagcttcgatgacagcaatctagtactacgaccgcgctctagtactcataatgcattgaccgctttacagacaaccatggttgactccttgggcagtccagatgaaagcactggttctttgaaacgtggatcatcctttattttggtctcgcctgataaaaccaagtaccagccctcttctgcacggatacggcggctgatgaacccaacctttgttggaactaaagctgccactgataatcccattgtcaaggcagtcttgaggcttgttctggccgtcttcgaggatcagcttttaggacgcaaagacttttcgggttttggtctctatctgaagaccccgcccggcttcctggaacaccaggcgtacttcaattcttgggttttttcctgtgtgctttcggcattgcaagaccttcctctggtccgacccggtctgcttcatgaaacccggacacttacgaacctcgggcgcttcgcgacacatttgacggaggcagtatacgaaggctggttcatcaacggcgcatcatccacacttgaatttattggtccaattttggagtatctccagcgcccggacgtatctcagttgaaaagcattcgtttatgtagccaggctaccgcaacgattcgctcgactctgtacagagttatcttatttcagttgtcagaggcagatgacactgaaaccgtgacattgctaagccgattgaactactggcaggtggtccttctttcggcggctgaaacccaatcaaaacatctacacctgctatgctacctgctgtacaccaaactaatcagcacaaatggtgatgttcgctcagccgccactcgcttatggagaatcatattggtgcaggcaccggatggaataacaacactcctcagctatggctctatctccctccagcgtcggttggctgacggcttcgacgctctttctggaatggacgacgaagctttcttgctatggatcgatgaccagcgcgacgatctggatgccttgttcttcggtgtattttctcgatcgtgggacaccttcattcaagaagagaatacaagcactgaggagtctgttaggtcccgggtatcgaagcgtaaagacaaactcagacaatgggctcagatcgaaaaattcgatgaagacatgacgcgaaagcacgaagctactttgccacattggatctcgaatatcacggcatccgagttcttaaagtctcaacgattcttgcaagatcttcaggatagctctaatttcatgtggtcagctttcgccgatttactgcttgacttgcgacgaccgggcggccttctcgcggtagacaaggaaaggagatggtggctagaccagaccgaaggtcgcagccgtatgcgactacgcctggttccaaatgagtctggtgaacgacaggactatcagcctaagcgtaaagcctccgagcctccagcaatcaaaatcgacacccgaatacgtgcactctcggagggtgagactctgacggcacctcatcctctcacaggggaacaggagaatccggaaggcgagtcgccgaacgacgataccgacaaccggagcctcatggaggataatttcgagatgattgacgatcctaaaatcgagctcgaagactatgaagatagaaaccggaaggtgatgcgatctcttcaacgtggtgatcaggttcaaagcgtgtgcaacctgtctcgaatcattggtctagaagcagtggaaggtatctcaattctcggcaaggactgcatctatatcctcgacaatttcttccagagagcagatggcgagattgtgaacgtctggcaagcccccaatgaggaacgagatccttatgtgcgcatgatttctggtcgcgaatcaaatgaccaccgctcgcaggagcatcacacaaggagctggaaatggtctgatttggtcagcgtttccaagcgtcgcttcctcttccgcgatgttgctcttgagatattcttcaccgatggcactagctacttgttgacattgctttcggcacgagctcgagacgatctgtgcaaccaactggctatcaaggcgccacaggtcacgggaagcaccggacactcgcgaccggaagacgtctggcgatttgaaactcttcgcagtcaagatgatgcaccacagaccctcgggtctaaatttgctagtgtcttcggtcaccttccggcaaacccagcaacacgaaaatgggtcaagggtgaaatttccaacttccattatctgatgttgatcaacacctttgctgggcgtacgttcaacgacttgactcaataccccgttttcccgtgggttttggcagattatacaagcgaagaacttgatcttaccaacccggccaccttccgagatttatccaagcctatgggttgccaaacactagaccgagaaatgggcttccgtgagcgatacaatgcgtttgctgaaatgggcgacgatgactctccgcctttccattatggaacacattactcttctgctatgattgtcagctcctacctcattcggctgcaaccatttgtcaagtcatatcttttactccagggcggctccttcgatcatgccgatcgcctgttctattcaattcgcaaggcatgggagtcagcatcgcgagggaacatgaccgacgttcgagaacttacccctgaattcttctatctcccggaattcctggtgaactccaatcattatgactttggtcttctccaaaacatgaccacggccattgactcggttgagctgccaccttgggcaaagggcgatcccaagatcttcatcgctaagcaccgggaggcacttgagagtccctatgtttccgagaacctccatcactggattgatcttgttttcggcagcaaacaaaagggtgaggcagctgtcgagtctgtcaacgtcttccaccacctctcatacaaaggtgctaaagacttggatgccattgatgacccaatggaacggttagccaccatcggcattattcacaacttcgggcaaactcctcaccaaatcttccaccgacctcacgcccagagggaagatcaacggcaccgcataccgcggctggacactcttgcagaatccctgacacagatgcctttgtctcttctcgatattgaagaacgagtaaccaccctatccatgaaacaagaccgtttgttgtgtaccgcgcccctgaggctcaacgtgccgccggcctatgactactacatggaatggggtttcttcgatggtagtgttcgtttctacgctgccgatactcgcaagctcctgggtcactttgagcaccttcatgttggtcaattgtctcatgctagctttgcggattcccgcaccttagtcacctgcggtacggactgtaccatctcattatggacggtcactacaacctccaaatctgttgatttgcagcccattgggtcgctatttggccatcgggcccccgtaactgttctcgccgtttcacgctccttcagtgctttgttgtctgcctccaatgatgggcaagttatgctatgggatctcaatcgacgatccttcgtccgagcccttcccggcgacggtgcggtcgatgtatgttttcttcttcctaccacctgctgtcctttactgacaaattagtgtgctcgaatcaacgatgtctctggagacattatggtttgtcgcggtaatcgcttgacattatatacccttaacggcatattgttggttgaccaaccagtctgcgagtcaggcgacgaccacgtcttgtcctgcgtcttctacgagggggtgcagaatgaatggctggaacgtgaattggtattaacaggccatacccatggtgtagtcaacatttggagcaagaccattcgcggtggccactttgagttggagctgatccgacagctgcatcataccgacagctgccgcgataatggtgccaatatcaacgccggcatcagttgtattttggctctcccccacgtggtctatacgggggatgaagccggccgagtggtgagttatatttttccggttcatgttcattaacgaagctaacatgatggtagtatgaatggaactgcattcagcgccgctgattttcttggttatcgtcttcccaggggattgggtctgttgtactttgcacaattttacacaatacacaattatttctcccattcattaacttcaaaccttcataattcgacatccgtactatcaatctaccaatttcctcggctagtatcttcagccattaaactagggaagggtgtcattcggacggaataataaatacaagggagagaaagaaaggagaaactatctataaagatctcgacaagccatgcaaatcatgaatgagaatgtctacggacacactcttttactaattttatctaagggtagaaagttactactttggagtcttttctatagaaaaactaactctagcccatgtaatatagtagatatattaaataccctctatactagtagaccggccggagtatcttagtcgaatcgacactagttgttttcctctttgcagatacaacgtagttcgatcgccattagaattataaaaaaaaaccccgacacttgctcagctgacggccgcccaacaacctagccacaattccattccagtctatggaccattcgagtgagccgttttcgactacatacagtactagtgggtttgtactttctactttccgataggtaacatgctgcgcagccctcctgggaggattacagtgcatatggagagctgtaccgagcctagatcgtcgttatgcagcttcagtccgcgtacgcccagtccctaccggtgacccgttaaactaatgagtagctgtttatcagttcagttagctacggcatctccagtggccctagcacccgccagcctttggagagggatttattaactgcatactacaaaaataacctttatcgtcagcacaccactttaatatcttcagcccaggaatcctcagccactaccagagtttaagcgccgtgctgtaggattcccttctgggaacgccacggcaaaggctcgtactatcggacccggccattccgttttgggtttatatgataatgctgacatcaagttccatcgctcttctggagctgaatctgatagtagcatttttggagagggcatatcctgtcgcttcgtactatcgggtatatactaaccatttacgccaccctcgcagcctcggggttctcctatccccgtatatgcgtcgacgccattatttcatttcagctccgagtgatctatttcctgcaggtgagattggcatatggctcggtcatatccgaacccacttctctttggttcatcgtgagattaatgtaggtgtaagcactagagcacagcgcccaaaccgctgaagcactaatgtcgattggattctcggtggcgatctgagtagcaaatagaattatacctcaataatagccgagagaaggtatctctattagccttcgtatcacggtcccgtttgttgtataaagcgtccatatcccacgagtattggagcttgtctcctccgcttgactcgacaagacactatttctctattagagcatttactctgcagcaagcagcactcatacacaatcccaggtccagatatactagtcacaccagcatcctgtatgtatgctaccacaagctcttcaggagcatgctgacccttgtagcgctacaatgtcctacactatccgtctccgtgtcgagaatagcacctcggacgctctcacagttgtcgaaaaaacctgctggtactatgccaatggatgtacctggaccgagaacgacggccagcatgtgctgttcatgggaggtagcggtacctctggaatgcttcgcttcaaatcctccttcggtgaaatatttactatcgtcgtgggcatccacaattacaaaccatggtgtggtttgctgtgggacctgggggaccaggatacggcactgaagctgcatccggaattctacagagggggcaagtattcgcacgcgacgcctgacgcgtgttacagccccgtgacgcatgttacaagggcttcgattacttttgagagggagaatcaaaacgaggtatttgctgttttgaaatactatccatcctaggtagtccaggacaggcgtgtttgctagtttgccgtgggatagggcggcagatatgtcaggtactgattggtcgactctgggtctagataggaagccttacttccgcactctattctcatctgtgtcactcatctgtgtcaagaatgtatcaagagtgaataagataaagaagatactttaaacggtccgttaagtctgaaaggactactagcacaatacactagactcctgacatttctagacctatcatcacccctgatgcggccgaaacggacactacagagataaatattatttgtgacttattatgaactgaagaagtgctattttggataccatgaagcagtccgactcgtctcgcttttttgctcatccagagtatcatcaatgctcacctgagtattgctcacatgagactcagaatagcactctccaagaacaacttcatacatgcgaatcagaggaatgtgagatcttacgactccccatggaagacttcgacaggatggtaattgagagcgcatccacacccactccacctgaaggtgcattcgtgtggccaaccgatatgacgaagccaatcactcccttctttgcacctaaatctacatacgttgctatatcccacgtgtggtcagatggcacgggtgtgggcttgcgagagcctggaagggtcaaggaatgcctctatcggggatttgcgatcgtcgcggcagggtatggctacaaaggattctggtgggatacaatctgcgtcccaagagatcgtagggcaaaagatgtcatgctcaagaatatgcatctgaactacaaatacgcagcatttacccttgttcatgagtatctgtgtcagttcccacggaggcaagatggcacccctgctatcggtcttgttctatcgccatggttcacacatggctggactgctttggagctagccatgtccaacaaggtttgagtgccttatcgactatctccagagaggcctctagaagaggtcattgtcgatcttgaggataacattatcacggaagacatcgcaactctcggccatcgagtagcaatcagacttattcggcgtctcaaattgcccggtcgttctctcttggatgttttgaaaatcatgagctgcaggacaacctcatgagcacaagaccgaattatgattatagctctcatggcacaagccatggaccttgaatacagtgactctatgatcgagatgaccaaaaatacattgcgttcatgcaatgaaatacccaagacattcattttccatggtcatactacactccactcgcgcggttccttcttatggtgcccatataacctgttcgacagaaacttggctgtgactttagcttgggataagagacataaggagatgttcatttggagaatacgaaacgttgaaatgatgacggaaggatggagcaagtctgataaaggttgattttggaaccggcatatcgaaaatgataactttattgtcttgaatgatggtacggcttttgggtattgggggtttcaattgatctcaattgagttacccttgaagctgaagccgtacagttcccatgtatctagggaattccaaattcgggctgcttagagccatccatcgaggctcatgcttcttcgtcaaactttttcagacctcgcaatacttgtgcaaccaatcaacacgagcatactgtcagaaagaggactcgaccacctattcgtcggtgaaatgtaaattggttgtcactaccttggctgcgtagctgtggatttcaatgagttcgaaagcactgataccgattattttaggatcggcttggatggaaaagagtgttcatccaggaggtggtggacgagtacaggaagtttagtagacttattgaagggcactttggtgagaagaagacacaagaagtccagacccttagggctagtgtaagaatcggaaccgaggatttagcacttgatacgcgccgagtacctctgagatgatattacctaggtcgttctgggtaatggacattacctataccagaagttgcccttttggggaattacatggcacttgactgtgactcccgcggcgtgagattctgtaaggatcgcatggtttctgattggactacagtgtagtggtgcgatgaaagagggagagagttgtcaattcctaaaggggcagaatgcccaactatctagttataggggttagtgcctgctgcactgggctgatggccaggtaaccactacatccaacaacatgatatgtgtttagactttagactccagtgtatggggcgaaacgcacgactagtactgaggggtcggtgtctgaggcattcgtccggtgatcacctgacccccatgtataacaatatgccattcaactcccgagccctccgaaagatctcacgatagattcccaggtagcacggtcttggtcaagctcatcgggcaacatgtctccgacatctccggcattgcgggggatatccggggggcgggcaccatcgaagattgctgctgtggcagagcttattccgcaacgcttataccttgattgccgaccttgccatagactcgtcgattcgaatctcctccctgttgatgagtagatcaatgcttgagcagacaacatgagggcttggcagaagaaaggcctgcaccagtaggtagtatggctttgagcactgtcatctccgcggctttctctattgctcctttctcttccctctcttcgctgctgcttctccatacttcttttcgattctcagggtggatacttcactggtgtagaacctttcgagtaaacgggtatcatgcccggaacttacttctggtagaaggatgccttgtcataccagtgaatcgggtagctcccaggagaggataaattctcgatctggtattcttcggcatacgcatggcgtaatttttgtagaaatggatacgatatagggagatcgcacaaacgtgttcgaagctcgatttctgtcacagagtttgaagtacgtgatacccacatccgaatatcatggtgtaaggctgcctctgcaaattttctcatattactcggtcgaatgttttccttttccatgcgatcaaccagaggattattgtaaagatctgcaaagacactcggacatttctttgccgcctgttgtatcatagctgtcgtcggcgcgtcttcggcagcaaatgctccttcgaggtaaatccccagagtccttcgggaagattcttcaaggagaagagttcgttcgatctcacgaccgttgcatcgtgtaactctatcctgaaatatgctagataaagacacaatcactccgttagtaggtattccatgacaggatttgaacatttacctatgctctaacattgaggtcttggaggtcatggggacgctctggaccgaagctttggtagggccacccggtagtggtgaagctgtgacgatctcgagcacaagcgagaacagtcatttgcataaaatcagggaacggaacttgcagctagtttttcttcctttcctctcccgtacttagtattctgacgaaaaatgcacttattcatctgagaatttggcatgtagcagaagccactaccgggggcgaccgcagcagcagcgtgatgctcagtggcatcagcagcctgattgatgcacacgttagaaataatattcagtcctgcctagtcgtgtagtcccgagagaagactgctccttgtagagtggaaacagcaggcaatttcttaccttcatggcattttgggccgcggcccggaggttcccaacctcttcatgggagagaggagaccccttcgccttggattcggtggcttattcagtatgttagtaatgctcagtcaactatagggcttattgatcgttctcttaccctgtgggccagccgcttcttctccttgactgagatagcaagagaaacaagaaacaagggcaaagtgggagagggcttgcttatatagctggccgattccatatgtcagtaatgctcagtcaactatagggcttattgatcgttctcttacccggtgagccagctacttcttctccttgactgagatagtaagagatagtaagagagagagaaagaagaagcaagtggaaagtaagagacggcctgcttatatagctggccgctctaatgacaaacaagacgaacagcaaacatcgcgatccgtacaatgggatcaatgactagatcatgatatagaccataaattttgaacagacatagtgagtagaagctctgttcttgcctaaccactctctctcgaaggacagtttgtagcttcttctctagggacaactgccaatagtcgatcggctaatacacggtcttcttctgtgtcctttatactacagacttgttgttgagggtgactcgctatcctatgagtattgggtgagcacaagttgcacttggctgggacgcataaccctactttgatcataaacacacaagtaaaactagtggccactggcggtcgagtatggactacagcaccgcaccaggactggaaggctattcgattgatccaatgacacggaagacatggaagacatggaagactgtagaaaaccctcttgaacaagacatactatactccgtaggcctagggaaaatgatacatacatgttactactccgtataggtacttccaattgaaagtttcaagcaacttccattcggaaatccgtagggtccatagttaagctgttcggaaatcatatttctccataactaccccgtagccgtcgacatgtatttaaccgggcccccggtgaacgttgcaaagaccgctacagtagtgggccgttgtccggtctaccatcctccggttgggggaagacggagcactctgcgccggatttgggattgtagtacacctattcaagccgttcaagcagaggaaatattgaaaacaaatcgaagagtattaatagaaatacggcagctattttagaacgaagaatcaagaatccaaggggaaatggcaaataaaacaagaaaagaagtcggatgttgtcgaggggagctgtctgatttcatcgtgcagcgtcatttgccccgcctgaaaatggggcagaggcaaggtacttgtgttgactatggcgtccccatactaagcgcaagtacccggcaattgatctgggactggtcaatgacaccacccctccttcttaaacaccgcgccgtccgccactcttcttctctcttcatactttcttcatttcactttcaaaacatcaaaaaatgtcttcttctcttgaacagctcaaggctactggcaccgttgtcgtttgcgactctggtaagctctcaatctgattatttgggttgtattgaaaacacgctaacactaaatatttaggtgacttcgccagtatgtattccagactttgcttgatgatatgggttccagcattggacagctagctaacttcaaccacagctattggcaagtacaagccccaggatgccaccaccaacccctctttgattctggctgcttccaagaagcccgagtatgccactctcatcgacactgccgttgcctatggcaagaagaacggaaagaccctcgatgagcaggttgaggccaccctcgaccgtctcctcgtgcaattcggaaaggagattcttcagatcattcccggcaaggtctccaccgaggtcgacgccaagctgtccttcgatacccaggcttccgtcaacaaggctcttgagatcatcaaggtacgtgcacgagtttatgcgaaatgacttccggcaattccgagctgacccttgctactcagctgtacgccgacaacggtatctccaaggaccgcgtcctgatcaagattgcctccacctacgagggcatcaaggccgctcacatcctccagtcccagcacggcatcaactgcaacctgaccctcatgttctctctggttcaggccattgccggtgccgaggccggtgcctacctcatctctcccttcgttggtcgcattcttgactggttcaaggctgcccacaagcgcgactacaccccccaggaggaccccggtgtcaagtccgtccaggacatctacaactactacaagaagttcggctacaagaccattgtcatgggtgcctctttccgtaacaccggcgagatcaccgagctggctggttgtgactacctgaccatctcccccaacctcctggagagcctgtacaactccaccgaagccgtgccccagaagctcaacgccgccgatgcctccaaccttgatatcaagaagcgcgagtacctcaacaacgaggctcagttccgcttcgacttcaacgaggaggccatggctgttgagaagctccgtgagggtatctccaagttcgctgctgatgcggttaccctcaaggagctccttgcccagaagattcaggcttagatcttcttttaattgtttaatttcttgtaaattggcgatctcccaaaaaattggaatcggtagatacgaattgatgaatttggcctcagtgctattttgatatataattctccggtgtcggtgtagcagatcagacttgaggggtaaagggaaccgcggaatctggccgggccggcttattcaggcccccgcactagtttagccttctactgctttccagctatggtgtcatttcacccggagcagagttatcctggcatcttatattacccgaggttgtgacaatgctattaggatgggttggagctgtagctgtgagacaagtgtacaatggtattgcagactgcataacacttctagcatgcagctattggggtatgtggcagcaattatttacacagcagtatgcacattattaataattatgtcataattattccccctcgttccgacttgctacccacttgggaaggtgggggatgttttgctgtggtattaagtaccgagtacacgtatacagagctctgtttatactgcgatacatgtacccagtacttgatccatacaagtgtagagtcacgtcgacatcattcgccttattatctccctccgcccacttcctctcctcttcttcacaatcctcattctcaatcttcaatcttcaatttaaaacattttaagataatcaaaatggtcaaggctggtaagtaatgtccattattggttctctctgggccatacataagctctcctcagtctccaagttccccacgatcggtggcaaggaccttgggtgtgagcagatttgagcaccttgtgatccagagcgcaaatccgggcctatcggcttgcgtcctcgctctagctctccactgctgtctgggtatctgccaatacctctgggacaatccggggatcatcgctgctcatttgctagaagcatggcatcctgatcctgggtgcggcacgagccgttgctgaggctgggaccagacaggggctctggagatctagtagccggcatgccggacagccttcgataagcattctggaacaattcattgacctctttcctttccgtgcagttgctgttctccgtggtgacgctaaggtcgccggcaccgtcaccttcgagcaggctagcgagagtgcccctaccaccatctcctggaacatcaccggccacgatgccaacgctgagcgtgctttccacgttcaccagttcggtgacaacaccaacggctgcacctccgctggcccccactgtatgtcattgatcagccaggtatgaggaggaaggatgggatgctgatcgcttctagtcaaccccttcggcaagaaccacggtgctcccactgacaccgaccgtcacgtcggtgaccttggcaacttcaagactgacgctgagggtaatgccaacggctccaagcaggacagcctcgtcaagctgattggtgccgagtccgttctgggcgtaagtttataattaatctagtattgtcgaggcagattgctaacattgtttagcgcactctcgtcgtccacgccggtaccgatgacctcggcaagggtggtaacgaggagtccaagaagactggtaacgccggtccccgccctgcttgcggtaagttcatgaaggcgtgctgaggtggagatgaatgctaataatctcttctaggtgtcattggtattgccgcataaatgcagctctattcccttttgaaccctggattttgatatccccgtaattggtggatggaaaatgcaggatactccgtctaggatacatgaatgaatgccaatttgacatgtgaatatttggatttggatatctgtcatgatcgatgaccactgtatagcttcgatgctttgtagacttccgtagaagctcggacggctgaccgctttccccacaagtctaaacaccggccacgtttcccctcaggccattctgtttgctctcaacttccttttctcttgtgttttcttttatacttttattctggttctgtcttcaatctcatcacaattgtgcatgtggtagtggagactgtttcattcagtatgcctttcgaagcccgggtcaagtctgtcctgtccggtgacacggtcgtgctgtcgcatatcaccaacccttcacaagaacgtgtcctgagtttggcttatgtctctgctccaagattaaggagagagggtgatgaggtaggtgcattgttgagattgattgcctgttgattgcaccattggaagaccaaattgctgcttgtgtgatctccaaattggctttctggtcacaagagctccatttagcattgaacaaatggccctacctaaaaagcgaagagatcgaaagagataaggctaatccaaagaatcaattatagccatacgccttccaatcacgcgaattcctccgcgagctccttgtcggcaaggtcatccagttccacgttgtgtacaccatcccctctggtgccaagcgcgactacggtaccatcaagctgcccggtttcgatgcctcattgcccgatatcagtgtgcaggagggctggacccgagtccgcgaagaagcaggcaagcgtggagatgaatctgaggagaccattggactcctggaccgtctgcgggcattgcaatccctcgcccaggaggaaggaaagggaacttgggctggcggtgacgacgggcacatcgacactagctacgaattgattggtgctcgggatttggttaaacgtaacttgggtcaccagctggaaggtatcattgagaaggtcctgaacggtgaccgtgttgtgctgcgtttgctgctcaagccgcaggagcacattcagactgtcattgccgttgctggtatccgggcaccatccgctaagcgcacaactgctgatggcaaggagaccgcggctgagccgtttggtgatgaggcactgcagtttgttgaggaacgattgttgcagcgcaaggtcaaggtttctttgcttggtgttacgccgcagggacagattgttgccaccctccttcaccccaatggaaacatctctcgattccttcttgaggctggtctagcccgctgccaggatcaccactccacacttttaggttcggacatggctcttctccgccaggcggagcttacagcaaaggccgatcgcaagggattgtgggttagccacaccggacccaccactgctggtgccgcggctgtggactatgttgtcacccgtgttttgaatgctgataccctctttatccgcaacaaggctggacaggagaagaagatcagtctcgctagtatccgtcagccaaaaccctccgaccctaagcagtctccctttgctgctgaggcgaaggagttcctgcgcaagcgagtgattgccaagcatgtcctggtcaccgtcaacggcaagaagcctgcaaacgaaggctacgaggagcgcgaggttgctactgttgttcacggtaacaccaacgttggtttggctcttgtagaggcaggttacgcctctgtcattcgccaccgcatggacgacgctgaccggtctcccgactacgatgcgctgctcgctgctgaggctgatgcccagaaggagggccgtggaatgtggacttccaagcctcccaaggcgaaacaggtggtggactattcagagagcgtgcaaaaggccaagctggagcttggtatcttgcagcgccaaaagcgtgtccctgctgtcgtcgactttgtgaagtctggatctcgcttcactgttctggttccccgtgataacgccaaattgactctcgtcctgtccggcatccgtgcccctcgctcttcccgcgggcccagcgacgccggtgagcctttcggccaggaggctcacgaccttgccaaccgccgctgcatgcagcgcgacgttgagattgacgttgagaccattgacaaggttggcggattcatcggcagcctgtatatcaacaaggagaacttcaccaccgttctgttggaggagggtttcgccaccgtccatgcatactcggctgagcagtctggtcacgccgccgagtacttcgctgctgagcagcgggctaaggacgcccgcaaaggtttgtggcacgactgggaccccgccaaggaggccgctgaggctgaggaagccgaggctgccaatggcgcgggaactggcgctgaaagcgatgccgcccccgcacagcgtcgcaaggactaccgcgacgttatggttacctacatcgaccctacctccgccaagctcaagctgcaacagatcggcaccggtaccaacgcgctcaccgagctgatgagcgctttccgcaagttccacatcaacaaggccaacgacaccccgctgcccggccctcccaaggctggcgactgggttgccgcccaattcaccgaagacggcgcctggtaccgcgccaaggtgcgccgaaacgaccgcgagaaggagcaggccgaggtagtctacatcgactttggcaactccgagattctgccatgggcatcacttcgccctcttacccaaccccaattctcctcccagaccctccgcccccaggccattgatgcagtcctctctcttcttcagttccccacctccgaggattacctcgaggatgctgtcggcttcgtcggcgaccagaccttcgaccgtcagcttgtcgcgaatgttgaccacgttgaccaggacggcaccctgcacgtcactctcctcgacccctccgcttccaagaacctggataacagcatcaacgccgacatcattcaagagggtctggccatggtaccccgcaagctgaaggcgtgggagcgtgcctccgtcgataccctctccaacctgcgcgcgctcgaggacgaggccaaggccgagcgtcgcggtatctgggagtatggtgatctgaccgaggactgacttcttgtatctatttgaattttgagctgcacgagggtgacctgtacagatattggttgggatggccctatgattagcatctggctgtgccatatacactgagatatggtgcttatttttaatttaggccggaaatttattgcattttgtgtttttatatcgcctgtttcgtctgttactaccttggttgatccggccaattagctttgttgatcgatggatcggcgatgtacttcggcaggtgttgggcaaaaagatactcaacgatgttcaacgatgttcaacattctcaagaagacctaaatcccacctgtgaatctgatagagagcaaagatgtatcacaaatagagtcaacccccagaaaacaccgacgctcgggtcaaaacaccgtcacatttatttcaccgcctccttccctccgccacctccgacgtctgttttggaaagggcgatctctcctgcaaaaaagtaaacaaacttgagagatcagagctcaccatgttttggggcaacaaaactccgcaggactccggagaggacctggcccgcaccgattcagctacgaagaacgatcccgccgcatccgcctcacaagcttccggcaccgcctggctcgccgggcacttgcaccaccttacaccggagcaggaggaaaagctggaagagttcaagaaagtgtgcgctgagcggaaatattacacccctgccgtgaaacaagcagatggcgtcgaggcgaagccggccagccaggacgatgcgactttattgtatgtgaatgtggcgcgtccaccttaaaccccaatccagctagaaatgaacaaaatcaaaccgaacgattgagtgctgactttgattatttgcgcaggcgattcctccgagctcgcaagttcgacgttgagggcgcgtgggcccaattcaaggacaccgaagactggcgcaaagacaacgccatcgaggagctgtatgcgaatatcaagattgactcatatgaagccgctcggcggatggtgcgtgttataataccctgtgaaatgaataccccgacctcgtgctgacatctactgtctctgtagtatccccaatggactggccgtcgcgatcgccgcggaatccccgtctacgtcttccagatccgccacctggatcacaaggctgtcgccgcttacaactccaccatgaatagcggtacacccgagacgcacaaatcatccaaagttcctgcgcgcttgttgaatctcttcgcgttgtatgagaaccttctgcgcttcgtgatgccgctctcctcggcgctgccacgtccgaacccggagacgcctatcgtgacgtcgaccaatatcgtggatgtcggcggtgtcgggctgaagcagttctggaacttgaagggtcacatgcaggatgctagtgttttggccacggcgcattacccggagacattagatcggatctttgtatgttgcgcccccgtttaatacgtccagggagttgaagataagttcgtgaaactaactcgctgtcagatcatcggagcacccgcattctttccaaccgtctggggctggatcaagcgctggtttgacccaggaaccacctcgaagatcttcattctctccgcctcagaggtcacgcccactctcaactccttcatggagccaaccagcatccccaagcaattcggtggcgagctggactgggcgtggggcgatatgcccaacctggacgagcccaccagcgagctgctccgcggcatcgagcaaccgctcgccgagggccaaaagcggagagaaatcatcaagggacctgttctgttcaacggcgatcacctccaggtcctaggcactatggatggaacgcagacgaagcggagagaaatcgttcccatcccgaaactccaggcttcggttgagtcagaggctaactccgatagctctgcagagaaggcggcgcctaatggcgcagagactaaggtagacgatagcgagaaaaccatcgacaacgtggcggtcaaaatcgaccagttatccgtcgatgagaatcatgtttccgtatagagcacagagcacatagaaaggtagcgggaataccgtgttgggatttgtgttggacatacaattagcgatgtgacatagcacaagatagcgcagatctcaataccgaggcatatttttttcttctctctgttttgttcttggatatatgtcggtttatatattatcatgaagtgggaactgcatgtgcatatgcatctatggcatgatgtgggtggcatgttggggtatgttctggtttcatcttcccaaaatttatatactctctccccgtatggagtagcttgctctggtttgttctccatctggattgactcgtatttacactgttcatgagccttgattatgcttgacatctggtcgtctataaaatgtactcctttgagtaccgaacagatgtgcatcaccatatttatatattttgagtgcgtccagtatatactgtagctaagtctctatgaagatttactaagagagtataactcatccttgagcatcggataatgaatcatacagaaatccccgaaatatatgcaagtcgaccaattagaatgagggctttggttgagcacatgactcgagcccatgtagatgcagacgcagggcaacgtctccacatcccatctatccggctgagtacgtcgaacatctagaaacgggtcgtgattaaccaaggaaacataatttactcatgaatgtccttgtatcatgatcacccctcaacacgaggtaaccatgtcaggcccaagcggtagctcgctaacgcggtaaacggccatgttgttgggaaagagatccaagatgagatatgatcgacgccacgctctaacccagtcaaatgcccgaggctcattttgcggggagcgtgaaagagtgggcattcttcttcacatgcgccgagcgtcgccaatggccgaacgactgggggagggatcgacaataagcccaagcacataaacccactaagccccgtacctggggtagatcgaagcgtgcactccgacacccttatacagatcacgaatcagccatgaatcgtaacgcaaaagactccatgaagtccacctggcggcagcaagcccgctcagagtggacactcttccactggttctacgaagtcctcggcatccaccccgaacacctcgacaagaacgtgcccgtccatctaaaggaagatgccgtgccgtacatcccagactggtccatgcaccgctgggtgctcacgcacgccgccatccccctcctgatccaccacgcgtacgtcgagatcaccggccacaacctcagcgcctggggcgccttcttcctctacggcctcgccttcaaagccatcgccatccacgaaatccacgtcctacgacgagtaggccaccagcacggcttcctagacggcgacaagcacgcgcgcgacggcgtcccagacgtcggcgtcgccaaggtcgtcttctcactcatgttaacatcaaccctccgcccaatgttcaccgtcttcatcgcctaccacgccacacacccgccctccacgatcagcttcctctggctgcccctcgaagccgggctgtacggtatcgtcctcgacttctggttctactggtaccaccgactgatgcatgacgtgggcgcgttgtggaaataccaccgcacgcaccacctcaccaagcatccgaacccgctgctgacgctgtacgcggactcggagcaggagttctttgatatcctcggcatcccgcttatgacgtatttcagcatgcgggctgtgggcatgccgatggggttttatgagtggtgggtttgccatcagtatgtggtattcgcggagttggcggggcatagtgggctgcgggttcatgctacgccgccgtcgacgttgagttgggctttgcggtggtttggggcggagcttgttattgaggatcatgatttgcatcatcggaagggttggaggaagagtcataactatgggaagcagacgaggctttgggatcgggtctttgggacttgtactgatcgtgttgaatcggttgagaacaatgttgattatgtcaattcgtcgcctatgccgttgtattgagtgaggttggcttgttgatagttttgcttctggtgtggaaatcagtacttataaagcctgtgcagtgttgcagagggttgttgacatggttgctattgttttcttttgctcactagttacactgtttgatgcgacgttggatcctttggatatcatgtctatgaatgaaatgttccccatgaccaatgactttctgtataccacaccgcatattattctgagcaggcatattcttctgagcaggctagtttggctcgagtacgtggcgagcaaatatggtatttaagatgttactatatgcagagaattgaagcaatgtatttattacagtttaaagcacatatggcatctggtatatgagcctatcaggcctaagccctccacagggcattaacttgcttctttcgagtctagacaaaaataattagcaaatgtaccgggagcagttagacaaaagacttaccatcggagccaaaacggcgacacccgctccgagtgccaccacagtgagaacgagttgcagcttggagaagctcttgccaaggatatcaaatgcctggctgggcgtagctcgggtaccgaaaatatcgcttccgtaagcgaagatgagactggtactttccaacagggtagggcgagagagcacagcattgatgccggcgacatcgcgcgtgtgcgagaggtaccatttgccatcgaagtcgaggtagggggcgtagcggaataggccttcttcggcttcggccgcggtagggtcacggtcgacagggcggcgagggtcgaggacggggcgaggaatgccgactatggagttggaggaggggagagtgcaaagaagctggcgggtggtgattccctggcgcgtttgagtgacggccatgtgggagattgattcggggatcatgaaggcctgggagatgacgtagggcaacgggaggatggcggtgctagagtagtttgtggcagagtcaaggagaccacggtcgttgggcaagggggattcgtagagctccgagatgaccagctggtagcccttggcggaggactcgcttccatcaacgtcgccccagaacgagtaggcgaaccagttctcggacatcgcggaagcaatgggttgcgtagagtccacgcctgcttgggtggatgcgtggatgacattgcctgagactccgtctaacaggtagaaactggcagtgtgggtctgctcgttcactgcagtcaccagggcgaggtcggggttgaggtacttgtaaaggaccgagcggtttccaaggaccctgccgatggacgccacagggtcatgcgcaggacgagcggtcgcttcgacgaccttctgtccggagggaggaacaaactcccacacaggagtcttgttatccttcgcagcccagccgaggactcggccatcaatgctagtggttaccaagaatccatcttcgttggcaaatgcagcgactggtgtaccatcttcacggataccgacggtggccagcgagcttccatcctgcatctcgaagacagcaatcgagtggagtttgctggtagatggttcgatgcgggaaacgatctcccctgtcgacacatccacagtcacagagcctccgtcgtcggagtagatagtcacgactcctggcgaagtcaacatagccttcacattccagtccgatgtctccactgcctggatgccccaggaaacggcgccgtggtttccagtatccaaggcgtatacacggccgctcttggtggcgacaataactgatttggcaagtccaaagctgtccaggttggacacttcgtcggtcaagatactgctcagaatgcgcttcggcagatccttcagccagtcgggtagatgttccaagtcccggacatgacgcttgacccggtgtaggtacgcgccgtacaaagtctcgtgaccctcgacctccaattcatgggctagatcttcttgggcgtcagtttccgcccatgtagctgcaacagtatcaatgagaccctcatgccgagtccactcgatctggccatttcggataagttgccagtctccatacttccggaaaagtgctgtcctaacagccacggactttcctttggcgacaacctcggataccgagtgaagggcaatatcagatgaaggcttttgtagatcccatcgtcccagaatcccatgagaggcggatgatacaacaacggcctccaagtcggtgactcgagtgaaataaacattagcgtcaatgacactgactgcaactgctgactggccggagagatagggtagccggtaagccttggtgaccttagcagacaccaagtccacatggtaaacctcagcccaggctccggcctcagtttcaaagtggaccaagaaatggggcagagcattaagcttgtggggagcgtggaccgtgatttgtcgaattccggagccggaggtattgtcaatggcgatagaagtgacctccttagtaccaataacattgaccttcagggacttttgcgatttgtcggcccagacgatgataggcgaggcggaattagcgcccacatagaggacggactccggggtagccacatcagcctcagagttcagaatttgatgacgagtctgtcgcccagtcaatggatccaaaacagtgactttgatcttgaaccccttcaacatagccgagtggagagaaatatagaagacctcggtggaagaagacgagacttggaacgggatgtcgccgctagaagaacaattgattagcttgggacaggttaaaaaaaaaaagcaaagacgagaccaaccttgcatccttgtattcccaaacagtctttccagtattaccatccagccgtttcacaatgccgttgccctcgctagcaaccacagcaatcgtatctctaaccccggaggtcgcggtggcatcctcaagctccaacagctcgagatcgccaaccacaccctcggagacccgatgttcccatcccagcttgccatcctgggcactccaagacgcgatgtagttatccaccgcagctacaacggcatcgttgccatcgagtccgcgcaaaagacccgccccatgtgcgggagagtctgccgaccgcgatatgttctggcgccataccagtgcgccgtcacgggggttcacggcacccacaagcaacttgtcggatatggtatatataagggaggcatttgaagacgtgaatggcttgaggaagaaggtcgagtcgggagatggagtaccgagaagagcgtggtggaagtcgatgtggtcgacctcgtcagagtagatggccgccgcgggagataggcacgcagcgaaaaagagcgccgcctggagccacattttgacgagtgactcttattgaagcattgaagaggggaggtgggaggtgatgtagaatggatgttgtcaatacaagcttggcgtccgggcggtgataacccagatcttctgtctacaaccatgaacgtccaacctcgctccctcattgcctaatgtcatggcaatagaataaccacgacatctaaaaatacaataaaaaagacactacaaggccgcataagcgaccaactattcttcatcatcaagatggccccatgccgcagtgcgaataccgtaagtcaagtatctgatagaaacaatgccccagagatctttcgttgtagttgagtatgttttttcgaacaattcaaagcttcgtagacgtaagaatgaaaagaagatatctagattccatacaacaagctaaagacgtagccaaaaacatctagatcttggtctatcagactcgagtccctcacatctagctccactacaccagtcaattcatactaaagccagagccctccagctaggaatacggtttggcagttcctatttccagactatgagtttgtaatgctaacattactattagaatgacatgcacaagaagctgagcagactagacttacatcgaaatccaccgaaagggctagtatctcatcgtccgttgaaatttgcatgtactcgaactcgcactcgagctcctcagagttattagtgggcctgccaaaccaattgttcatcggattgaaaagtggacgtattgcgcgaaaagctccgattccaattatcacctcaaatcccctaagcggccttccttcaaaaccaatcatcgtttgatttcctggagcgcgatagccaagaatattgttcggcatatcactaggataaataagctctaagccgcaatcttatttcaagtggaatccattcgaagtagtgtgtaataatagaatcacgcagaatgtatgatccattcgtggctggcaaggcccgagcagctgcacggaaacccgcgccgcgagcgcattgctgaaagctcggcggcttgagttcaaacactacgatatgccaatattagcaggattccattccttgctataggaatacaatcaaatgagatggaatcacccaggtggtctatatcatcgtcgaggcatcgcggggtttttcgcttagggtttcaagcaacttctccagatttaattcaccacctttgaactggttcgaaagaagcgcccaacaatatctatgaatctaaaatccatttggtagatttgatggggggattttttctaataatttgctaacctcttcccagcatgtatcaatgctagagatctgttagctgacccccggctgcagtcaaatgaactaagcactaattagcaagtacttccaatagcagattcacaggatcaagacgcacgaaaaacgtcacggtcagacaaggatgttccgcatgatacacaagagcgagagaatatcgcatccagagccaggtccatttctgacttcttgatgatttttgagttgtttttcgtaatttggaagtagcaacggttgtttgtcgcttagcctagtgtcgctatcatgattgcatcatcatactcctattgcgaaaggtttccacagctagattagaaattaatcgtagtatgagagtagaagggctatccttgacgtctggagaccggctactacagcatcggatcccagatatatctgcactaagagtaggcttctacatcaatcaattattaagaatctaagaaagtccacagtttgttgaacttgctctcttccataaaagtaataaataaatatattgtatattgtgccttagtatgtactagtttctgaacgacacatcccagcaaaatcgctcatttatactggttgccttgtctgacagcgaaaaacgactttaattacggtcgttgttgaggaatcctagattgacacgcaggttagcatataaaaaggcttcaggcaaaaacaagggtcacgaaccttcagccttgttcagcagctggttaccaaagctgccactggaagagtcattgttgccagagttgccgtagctagagttgttgttgctgccgtagctgtcctggtcgcgaccagagctagacttgttgccatagctggaggagtcgttgtcaccatagctggaagagtcattgttgctaccgtagctgtccttcttggaggactggttgccgccgtagctagaggaatcattgttgctgccgtagctgtcctggttgccaccggagctggacttgttaccgccgtagctggaagagtcgttgttgctaccgtagctgtcctggttgccgccgtagctggaggaatcattgttgctgccgtaggtatccttcttggacccagagctggacttgttgccgtagctagaggagtcgttgtcaccatagctggaagagtcattgttgctgccgtagctatccttcttggaggactggttgccgccgtagctggaagagtcattgttgctaccgtagctatcctggttgcgaccagagctagacttgttgccgtagctggaggagtcattgttgctgctgccgtagctatccttcttggaggactggttgccgccgtagctggactggttgccaccgtagctggaggagtcattgttgctgctgccgtagctatcctggttgcgaccagagctggactggttgccaccgtagctggaggagtcattgttgttgctaccgtagctgtcctggtcacgaccagagccggactggttaccgccgtagctggaggagttgttgtcaccgtagccggagctctggttgccactgccgtagctgtcggagtcgttgcggtaagacattttggtgggttgtttaggggggattggtttgtgattggagtgaaaggaagaagatagagtgatgagttcaagggttatgatgcttatcccaccagcggcgagcgctttatttatctcccaccaggaagccggccagaatcgaatagaagagaatcgcccctcgtccgtaaacccctcaatgacaacatgtggacaagcgaggcgagcaggggccaatgaacatggcacggagaagctagtatatccaaagctcactagtttcgtgcttatatgttagtgattgctcgaaccttgggagccactttttcagcttaggagccacatttcagcttctgtggcctaatcgggacatgaccccctagttgacccataattgagctcgatgttgtgatatcatccaatctgcgaacagagaatcacgccatggagaaagccatgcgggactctcatttgccggtcgaatgatgtagctcttttccggagccggacttagccggagaggtcacttcccctcattacttggctcggtcattggatactgttatgcaggtaaagtctagactcctcgatctgatttgatgataggtgggatgtgtatgttcttaaacacgtacgggaagtacagagtagccctgggaaccctggaaaccctgaaggggccctcatttctttttttgggacaggcaatatgataatgtagtgagataagccaatcataattgaagatctggcatcttctgggcccacctaggcaagatctacctcgatccgcgctattgatttccatggtaacgtgatgcatttatctccgaggtccgcccggaatcttggtttggctttgccagtcccacggttcagataatgcacatccctcggtgtggctgtgcatgtgcaacctacccctcctcgacgccaccaaggtggtcagcctcgatttgactgcgacgtactcctccgtacaacatatcgaggacaagaattacccctatccacgggtggttttttgggtggtttttggggtagtttttgtgatgatttttgtaattggactgactacacgcaacacgtgtcaaaaaggtataggtatactgtacggagtagacaagtctgattttatctatcctatctgcgtagtctctgtctgggtattcattcactcattcctccccaagtatcattattactctcatccaattattggtttagttggagatcttgtcgctgacgtgcttgctgtatggtagaatcgaatgttagcagatatccagagcaagcaatttggagtgtcacatacccagtggccttctcgtaggccgagcgggcaccatcggttatcttctcctgcgtgttgcggtcgacgttgtagccagacttcttgacacctgcaccgaaggctgaggcaaagcattgtcagcgcaaattcgttttacaccaagaacgataaaccactcacccttgtcaacgtagtcgtcgctctgctggttgttgttgctgctgttgttgctgctagactcgtggttgccgccggagctggaaacagccttcttgatgaaatccatgatgatgatatgtgtagattatttggatatttaacagagatagatatgagtaaaaaagtagacaagaagaaagagagttgtatttgtatctggtcacagtagggctgcccctcttctgccaagtttacttgagtggcgattcgtcgtcattactccggtgtcttaccgcccccatgcctttccaggtatgcagtctgggtcagggtgggatggtaagacggctaattgcgcattgcggatcggtgggctaggctcgagcataaggaaccctaataggccatgatcttcaagtagtaaaagtaataattgagacttattttcaaatacaagttgttatatacatctttgaatgaaaggtaactccaaaaaaatgccatccaaatcaaacaaatcttaaacaccgaaacaggccttattggcagaccggatggcttccttctcaccctcgctcattgcgtcggtgatctcccaaggggtgttgcctaagcccatagcacgctgaccctctgggctcagcgccgaccaatccatagcacccttgaatcccgactcaccgggcccaccagcaccggggaaatcccacggaggcgaatagttcagcgcagcctggcgctgcttaagaaggtatttcacattcatgtcgcacagcggggtagcgggaatgtacataacactagagtcctgggtaccacggtgctccttgtccacggaatgaagagaatcgcagtgccacgcaacaaaatcaccaggcgcaacctccggtactgaaaccatagtcgactcgagatcgagatgcgggtgtgtaaccgggttgtactcctggcaagcgccaggcacggagccagggaatgtagcatccaaggccggttttgaggtttcgacgtcgaagaacggacgcaggatagtgtatgctgtgctgtggttgatcatggggcagacgtgcaacgagccctcgccaggcttggtgtccgacatagatagccaggcctggaagaaccgcaacatggagcatgcaccggcgccattgtataggtccatgttggcgctcagacggtgtcgcgcatcccatgcgtcgtattgttcccagttaccttcgaggatcttggtgtagactcgagagtactcggggtcttcccagcgctcgagggacccaccgtcaatgtgcggaccgagggtgaattttgagtcgcctggatcgcggatgcgtagacgatctgcgtaggtgagcggattggtggttgagatcttgctgttagggtcggatgaatgccacagctgctgcatgaagcgctgggtgttgagcatgttgctgtgaccgcgggcttcggcctgtgatggagtccagtacagctcgtagacagctggggagtcagccgggaaggccttgactcgttctttgttggcggccacatagtcgcgaatgcgctgcttatactctagggcttggtcccgggggactacattgcggacgaccgcactgcctcggtggcggatttcttttaatgcagcctcagacacatttccagagatcacatcagagtaatcaattgagggaatgatctggtatttgaaagtcagtcttttgctcggtgttgcgggttacatgtgcacgtacgtcgctgccctttgccttgatcttttgcacttcttcatccaagctagggagcaagcgctcccaactctttgtaattgcatctttgtttttctcgaagatttgcgctttcagatcttgaaaccgtgcggggagaggttctggcttgtagtcgggccttaagctggggaaaacggatgagatatcaccggcggccttggttgtctgggtcgaggtagaggccgctcggacagcggatcttgagataaactttgatagagacatggctggagtgaattcaagctgcgtattccaactttgcggggatctaccccagtgctttatatgtttttcgtggggaacacaacatacattggtcgaggcggaatcattccatatacagtaatcgagccgccgccggaaagagatgggccgcgaaattactacattaggagatcgacccgcatccggtccgtacctgcaggcgcttaccataggtacagcttctgttcatgacatcagcctacaaatcattatttatgaggctaaggatgtcaataatggagataagttctttcgaagcttttggcggttcggagagatcattcgggaatatgccaagccgggtttcgggatagaacatctgcattcggccgaagtactacggagtatacaatacaataggaatggaacactacctgccataccacggcattaactgtggacttcaattgaattgaacctgcgttatcttgcttgaaggataggatcaagtgaatgttatatgtgctgcagagcagttctacgtatgtctatatatctcgtagtgaccccgagggcaattctccgagggcaatcgacctggtccacggtttatataacccaagaaccaaatgaaggcatgccgagttctctctattgtaatgtctcactggctgatccaaactacagtatctagcacatattcgcatcaaacaatatacataagtgctttcatgaatagagcataatatcaagaagaggggaactgctgtcagatggcctgatacgtacccaaggagaccggagaattagattggattgggcctcatccagccggcctcgtacgatgtacataggtacaaggatcgcggccacgttggcctcaatccttcctctcgtccgaccggttagattctagtattctaccccgcgaggggcagaaaatgggcacggaatatgtatgccgcgcaaggtccacgatgtccactctatgtataaaagagggctgaatcccctgctagaaaccgtataactcaacccgtcaaccgttaatacttaaacatgtctatctctgtgcaaggaaagaccgccatcgtaactggagctggctccggtatgtctcctgcatactgcaatatcaaacggaagcttacacgtagtcaggtatcaacctctgctttgccagattgctagttgaaaatggctgcaatgtcctaattgcagacctagccttgcgtcccgaagcgcaagtgttcgtcgatgagcacaagaccgattccccgcgagtggtcttccaagagaccaatgtggttgactgggctcagctcgagcggatgttcgaggttgccgagaaggagttcggcgagattgatattgtttgcccgggcgcgggagtctacgagccggtaagaccaaaaaaacccccaaccaatctacaagtctaactagaacaatagctctggagcaacttctggcgcccacctggcgcgggcgacagcaaggactcgcccactggcgggcgatacgctataatcgatatcaacctcacccacccgatccgcacgacccagttggcaattgctcatttcttgaacaactgtaccagcggtcgcccgaagcatatccttcatatctccagtattgcagcccagaatgctaatctcgccaacccggtttactgcgccacgaaacacgccattagcggctttgtgcgttcgctcgccaatctcgacaagaagtttggtatccgagtcacggccgtggctcccggtgttatcaagactccgctctggactgaacacccggagaagatgaagttgattgatggcagcgatgagggggtgacgcccgaggaagtggccgaggtgatgttggcgcttttgcagcaggatgaggtcagcgagactatcggcgaccggtcgggtaatgggcagcagtttaaggtggagggaggtacgattctggaggtatcaaagactgtgcgcgcagtcgctcaattcaatgaccctggtcctggcaatcgccctggaaacacggcgtcggatcatcacgaggtcgaggaggagacttataagatcctggagcagaaaggatggggactgtgaatgttatagtcagttagtatcaaatacaactccgacaattgtataaatacctcgaagtgcttgaaatggagttgatgttgtagcaaagtaccaagggcgggtcatgtgtcgacccgataagctttggaaagtcaaggttgggctctcaagtggccacggatctttctctccttaaattcctccgccttttccattctccagggcttttctcttcattgcaaaactactactaatctctctcttttggttttgcctcggccccgctggtagcggccgttaattatgttttgcacgccaatcgaccgataacaccatttccgcaacagataaccaatatcaaaatggaggaggccgcgctcggggttggtccatccgggggacatcagaatatgctgcgcaggtaggccggagcccaatatcttgatgttgatggtggctaatttggattccattagacgtgcagcccgtgcaagacctggagatgtcgtgggggaggccagttgggccagcagtgtgatcaacctggttaataccagtaagtgcgaggaagcgcaccatacaagagtgctccgaattctgatacaatttctcctgcagtcatcggtgccggtgtgctggcgatgcccctagccatctcccgtatgggaatcgtcctcggcgtctgcgtcattctgtggtctgcggtcaccgcaggattcggcctctacctgcaatcactatgcgcgcaatacctagaccgtggaagcgcctcattttttgctctatcgcaaataacataccccaatgcggctgtggtctttgactgtgcgattgcgatcaaatgtttcggagtcggcgtgagctatctcatcatcattggagatcttatgccgggagtgatacagggctttgtcggtagcgagcctggatacgattttctggtggaccgccacttctgggttacatttttcatgtgcgtagcctcgtgcattttgtctaaacgaggggaagtgctgatcatttgactttaggctgatcgtgattcctatttcctacctgcgccgtttggattctttgaaatatacgagtatcgcggccttggtgtccatggcctatttggttgtcttggttgtgtataagtttgttcaaggagacacgatgaaagatcggggcccgattcgcgtgggccattgggagggcgcagttccgactctcagcagtctgccagttattgtctttgcatttacttgccatcaaaatgtactttcccaagtcgtgactcgtcggttctttctaacaagcattttagatgttctccatcctcaacgaaatcggcaataacagccatttccgcacaaccgccgttgttattgccagcgccggtagtgcagctgcaacctacatcctcgttgccatcaccgggtacttatcctttggcaacagcgtaggcgggaatatcgtcggcatgtacccaccgggcgtgtacgcaacgatcggccgcgccgcaatcgtcatgctagtagtcttctcttacccactacaatgccacccatgccgcgcctcagtcgatgccgtcctaaaatggcgtccccgagcacaagtcgctggcgcagagagctctccaaaccgacacccacttctaggcccgcgcggaaaccgcacgccagagccaatgagcgaccttcgcttctccattatcacaaccaccatcttgattctgagctacctagtcgccatgaccgtgtcctcccttgaatccgtgctggcatatgtcgggagcactggcagcacgagcatcagcttcattcttccgggcttgttttactacaagatctcatcgcccgactcgcctacccaccagggcttaatgaaagaggacgatgaggcggaggatgatctctcaggagatgacgacggcgacgacggcgagggttccctcgctcgcccattgacagagagtggccttttgcaccgtggcacccgccactggcgcaaggcgctgcttcgccgactcagcctggcattggctctctacggcctcgtcgttatggtggtgtgtctggttacgaacaccttcttcaaaatctcacattaataggccgcgtcctttatgtatgaagtctctttccccttcttgttggccggagcccgtctttttaacatctttcaacccgccgtgtatctcaggaacttctcccttgggctttctcgcctgttcatcagtctcatttctctttccatattcttctccgtttgcgcattgctctctatgttcgctgctgtgtctattctgttgttggtattgctctttgcacgtttaagttttatttgatttgggttgtccatgctaggcgtttggatgattgtgtgtatttggctcgatttcttaatctatactgttggctgcattattacgcgggtatgcaatggctaattgctttggtaaggaaaaaagagggaagataggattcaaggcaaacttacagcgaacagagttataagaattcaaaatatgaatgaagagaagtgtacaaagtgattaaaagacccgatgtaaagcataaaaccctcattcgaaactaattccgagaagcaccaaaacgcaagcttatttgtcaagtttgtttgctatcggaccagagcctgctacaagtatgcatgtatctctcaaccctcaagacatttcaatgcgcaattagttgttgttgttagcaccgttcagaatccgcagaatggacatgaacaagttaagcacgtcgagataaagcgagatcgaagcagcgatctcctcctcaacgtgatagtgccgcataaccaactgcgtatcgacgagaatatagcccgagaagacgagagcgccaagaacaccatagatgatctccatcgtgctgttgaatgggataaacatagccacgaacccgaacaggaccatgaaccacaacgcgccaaacaggtatggcatccagtcggtgaaatcgtacttagtctggcatgcaaagagcgtcaaggcgacgaagattcctagtgttagtgcgagcgcttgcaccactactttcgcatcgtagaaagatgtcgccacgctgattgagtacgcttcaaggatggtgaagcctgataggaaaagaaggttggtcgggtaggactttcgtttccagaatgttgcgagcatgaatcccagagcaccgaaaactgagattatcatcagccagaagttggactggatccaggtgcggtaggagtcgttaaagaaggagattgagctgaggatcgttgtaaggaggagttgggccgttctgagcgaggagtgttagtatattagagcccacgcacttgagtctgcgtttgtaaatcgtgttgcacttacagaatcgagtacactttgcgcacgaattgcattcggatgtcaatcgttccttcggcgacggtacctccgaactatgcgattttatcagtttctgtctttctagccgggctcaagacccctaaaaggcatggtaaatgcataccttgaaatcatccggcagattgtcatcctcaccacgaggcgttgactccgctggagccgctgtggcctcgtaggagggaggggctcgggagtaagacgggtcatccaaggagtcccgctgaggagcaggctcgtatctggtgtttgcagccatgatggtatagagatatgtttggtctcgcggcgctggtgttgaacgttgaaatggatcgccgaccaagaggaagatgagctgaagcctggaggtggagcccatatgatgtgacgagtcacgtgcgataagccacatgtggggcgcgcttgcttatgttatacatacactttgctcgggtggcgcccacatgggtaggtggaccggggacagcattctatatacttttcactgtattctatttttttgcgggttaatatctcgaagatataagcacaggaaagacttcgaatcatataaagttctaaaacgctttcaatatttgagcttttataatgcactcgtgtcagatgaagcagcagaacagactgctatcgacttccagacccaccgatctatgaagaatttgagttatccgcacaggaccacgcagctgaaccaccgttcgccttgtagctgtccatgatgctgacgacagacccatatgtaccagcgaccatcatgaaactgccgatgacgataacaaagacactccaggaaaccatgaacatccacctcggggatcggtcgaccttccccttaccccaattatcgtacagccacatgcagcccatgggttggaaacacatgaatgtgccgagcaaagcaccgataagcgagacgagactgtcaaagacgggaatggcacttgcgatgacgtaggaaataagaccgactgctgcggtgcagccgatccacgagccccagtgcaccatgctgtttgaggtgaggtgtttggagcctctgagggcgcggacgaagacgaatttcgcgggcaactgtcagtgatgtgttagattgactggatcgcatagataaagagacctagagaggaagtgcttacatgaacgaacagcatcacagtaaccagaagacctggaatggcaaagccatagctgaccttcttcatcgtatcgccggcggagccaagagcaggcgaggcaacataagagccgcagtagtagtagactacaacgccgatggtaacgtagacagccgtcacgctgctttggcagatgatcaacgagcgagtatagtatttggggtcgcgcatttccgatacaatagagaagaatgccggtgtgccagcgtaggcgaagataatcgagctcacggcactgatggcttcactgaatttgggactggcaacgatcttgtagtcagatacccagatcccctcttgtggggctgaggccgggcggtcctgaacgccgacagcgatggtgacgatgaagactatagtacgaatcggttagggctatgttatatcccgtgacatctagggaaaccttacttgcggccaatatgcaagtcagtccaatccacgctaaccaactgatttttccgagagttcggatactggcgaagataattcctgcgacggctgcaacagcaacatagacagccgtgcatgtggcatgactcgagacggagttgagagcgattgacagaccgagcattcctgaaccggcgacgaaaatccagtctagagaggcaagttagaagcgaatctataatcgtgatcattgcatagacctacataggcagaacacaaagccgaaaacctcacgaccgatcacaccgaacatcaagtaacctgcatcgtcgataccgtagactgagcgatggttgagcttaaacacgccgaccatgtagtcggaccacgttgtaataacagcaacgacgatcaggcagataacgcctgggacgaggcctaatgtatcaaaggtgcttgggatggagaggacaccgaggccgatctggctcttcatcatgaggatcaccgttcctgcccatcctacctaaagaggcgttagtttgacccaattggacattccatggaaaagaaaaggaagaaaagaggaaaagaaggaacgtacatttcggtagttgggtccggattcggtgatctctccaaacacatcatcgtggttgttgatatgactattctggatttcacggctctgagatggatcaagaccttcaaggtctttttcgtttttgatatccatcatattgaagaatgggaaatgggaatgtaaggcggatacaaaaactgggtctcgaagtatgcgggatgtcgcgcttataactacaccggatgtctgaccgatgggccactacggccacccagagagacagataagggctaatcacttggattcaacgaaagtaaatggtgaggcgtctgtaatacccattgtgggtactcggtacggagtatattggctcactttacaacataattctacgctagcccggtttcagaactataaccccgtagatccaccagaagctgggcaatgataaattgttctcgagcattttgaacgccttttgaacgtatgactagtccgtggagactatgtggagtacaagtaggtacctaggtcaagatggttggacactttacaaggttctccataactaccccatggggagacgcggagaagttcatagttgtgcaaccttaactaaacaacgttacgcctaaagcgcccagagcgcccagagcgcctctccggatacctcggcaagatgcgtaaaataagagaacacctatgtatttatgctagtacatggacgatcttcatcaatgttatcaggcacgttatctatagaacaacaaagtttaacttacatttcccttatgtacatttatatagataactgctaacctgctattatcaaaccccccagataagctgaacatccaagctttgccacggcagtaccgacgtcagcctcttaccacatcgtgaggggtttaaaagggggggaaagctaaaaagaaggggcgtaggtggcttttcccttcgccaagcagctaatcaccggttgcttggccgctgatgaggcatttgcttccgagatcggcaaccgtacccggtcattgctaaagtgtacgtaggttctttgtatgttgtactccgtacggactacggagtagatatcatggctttcctattatgactcatatctctcttttctagcattgattagacgaacaatgcatatttggcccttttggtccggtactcgagagtgcgatagtgcgatcgtcggtgtccggaacagataggaaggtacacatgggccaactgcaattgtgctgcgaatatcaagggaatggatcaggcggtacatgcgccctgttagaatattttacgtacagagtactcagacaaagcctgggcgctctaactaggacgtcatttttcgcttaaattaacatatggagtagttgaaacctcgagcaacgggtagacaggatcctaacgtcagtttgttcagtatgatccactcctatcatttctgtcgcattctttaacccttgttagttctcgcgtgattttccctcggaaacctatgatctagaagagtccgtgaatgtaggatctatgatgtaggatctacaacatgcatggagttgccttccagaaagccctaacataggtgtcctacactaagacaaacaaagtaagatcgatcctatagataagacattatcaatgacaaaaaatatatcgttgaatcctggagcctggtcgatcaggtcgataggcaaactatgaggtccactggcttgatcttgctcctttgtctcgctcgttcgcagcaacgctcaatccgtgcttatttccgcctctcactcctcacatattcagatatcgaatcgatgtgctttcatacgacatagaatacccatcacgatcgtcgcttcactgccctaacatcccattgacatgccatattggtggcagtgctggcatgagtgtttcaggcaagggatatacagtaatgaacaagccggcagatatacaccgctaggttaatttcaaggttctgaagacaaggagctcgccacacaggatccagacacacccgaggctgaccaatgcgagacatttgggttcgcgcaggagctagcccgggaccgcctgctttagagacatcgccagattgggaccttcagagtccagaactctcgggcgaaagacccatgcagacaagcgcagtctccctcacgcaatatccgtgcccgccttccttcttctatctgatagaatccgagaggacaatgcgactgtattggctgcgctgacggaaggagaagaggaaggaaggagcaaaaaagccactcggcaggcctggcgaacaaacacggcaggagcacgtaccagacggataccattccgagcaaactactatctcgacgtgactcgggccaggtacccgtacccgtaggcgtatcttgtaatatgtgtgtttgtcgcgaagagaagagctgacccgaatcccaatattaatatttatgcatagcaagataagaagtatatgcaaagttactggagatatctataatttcacatcacatccatcaagcgggtgacggccccgacagagaatacccccctgctcatcagcaccgataggcaactggcgcagcctagctgaaacctattcaataatccgacccatcgtgtctctgcgctctgaatccggtctcgattccgaatcctcgtctgtgctcagatccgcctcgtcgtcttcgtccgtgctatcgtctccgccgtctgccatatccggtcctacacttgcgctggacatgtaatttggtagacgtcttcgctcgaaatcctgcgcgtgggctgaggctacaatcgagccgacccggctgatgccaaccgaggggcggcggttgcgggcccgcaagctggacccggacggggtgccgttttcgacatcgccgggcgccatgaaaggtgttgaggcgtgctgctgttcttcgagttggacatcttctgctgagccgtcgaggggtgctgcggctcgtgaggggacatcgtaggggagagggacatcacgggaggcgcggaagaggaggacattggtgcagtgttcgttttcgacacggaagatggaccaaatgccacggcgacagacctccgagaaggcgaccataaagctaagcagggcggactgctgtatatttttgatgaatattgcgtagaagatccagttgaaacggatcaccacatcgagcaccattgcggcatagtatacccatacgcgacggaaggcgaggacttcacggagcattgggttctttgcgtatgggttacccaaactccaatccatgattagatcccacactgaggtgtagacggcgtttaggagggcgaaggtgataaacgaggcttggaacctcgtttgaaggtcgatgcggtacatgctgagagtggcatagtagaggacaccgaataaatacttgcccaagttcaggagatgggggaacgcgttcttcgtgtccagatatcggcgaatacattggaaagctcgccagacagaggggaggcattggaaaaagcccaggagccgagagtgggaggagttgcacttgggagggtagtcccagtacgaggcatatagacagaagaagagctcgatgttccccatagcatatgtctgagaacagtacatgtcaccgaggaagaaatcacggaactcgactgggtagattccggcaagcaaaaggcgccactagataggttagatatgctaatcgacagtaatatgatgctgtatgaactcacattggaaaatgcgaaccatttgcgactcctgtggtaaagaacacgggccggcaagaaaataatgatcacagtcaagccaataaggacgacaggccaatagacatacatgtggttgtaccatgagaagttgagccacatgaataggcccatcaagaaaaggaagaaagaagggatctgtacttgtcaggatgaatgatcagagctattaccgcgaaataagacatacctctagcaactgacgccactctaaggtgtttctggtatcgtattcgaagacaaatgcatgattgatcttcgactttgtccaaatcatacaatccaagcagaagagcaagaaatggaagacgatcaggaaataccctccatatatctgctcgattggtcaatggagtcacacaaaagacgaaagagcgaagaaccaacctggaggagataactggtccgaacttgttcagcgacgttaggcgagcggagatttgacttagaatcaaccaaggccttgatggcaaacagagttccacccatcaacaatagaccggagcggaaagtattcggtgagtaatcaccagatttgttgattgtgtgacggagtttggagacggcgattttgcgattaccgccctcaaagtaacgggcatacaagtcttcgaccgctgtcatcaaactctcaatcacctcactctgtacgaaggacgctttgttgaccttttcagacatgtaccggagcggtggacgggcgtggaccgctttgtcgtatttcttgttaatcttccggaaagccgttcgattcaaataagcatatcccttgaggagctccactccgcggtagaactcctgcaacgcatgcttgagcttacgcttagcggagcgatagggcacttcttgactttgcggatcctgccgccgcatgaagtccctccggttggcgatgaactcccgatcttggggttgcatgccgggagtcgccatctccgccagtgcttccgagttcttgccgaaacggttctttcccaccaacgaacccttgattcgagcattcgtgattttcgcgaacccatttggtcgttgatgtgtctccgagtcatcggatttgattctcttagaagccaggacctcttggattcgctggtctcgcataatatgtaactgctggcgaaggacccgcagtttctcggtggcctcttgttctttcgtcacataaaacgaatcgattttgtgcaattcgctatccaagaactcgaagaattcgtcccgacgtttatcaagctctgatgtagcgctagggtctacctctgccgtaaacacgcgccgcagcagctgtgatgtccggttgcccgaggccaccttcgtcaaggcgtcaccactcgaatagctcgtccgtggatccaattggggcctcttggccggcaatggttctgataaagggcgagagggtgagccgttcagcatgccacgtcgatccatgaccggcgaaggtgtccggagattcccaagtctatctgcagtatcctcatgtggcggatagtcttcacccgggtcaagtgccgggtccggaagttcaaatgaggctacatccgagcctgcggtatggtgctgttgtggcggcgttgcgagtatgcttccataactaccaacgttctcagagaaccgcgatcctggcgtgcgaagcggttgtcgctcagttttgggcaccggcgtggagcgcgctgatggcggcttggcaccacttcgtcgtggcgtcgatgggccattgtattctcctgcatcgagatgcttatcggtattggagggtgtgagagcagattggactgcgccgcgactttgcgggctggaagtgggcggtcgataggacgggacgcggggactgcgatttgccttctgtagggcccgggtgatggccttgactttcttcttgccagtctagacagtacattcaggtaagtacagctgtgacacaatgtggcaatgatgacgaaccttgtagtcgagatactttgcccgccattcaggaacgagttcctgttccagctctctgcggatttggtcagccactggaatgtcgcacactgtcacgggggaatacaaacttggcaaatttcatcctgaccaacaatccaccgtcattgcatatggtttcgaaacctggagtgccggcgccgatccgaacatcaaatctcacacaagtgcgagggttccaaagctggagcaagagtaaacgaaagcctcgccactcctgagtcgagataggggaagacggatagtattggaaagaggacctcgaggaaaaacaagtatgttgtagaaattccaacgacgctatactcagatccgaagattctccccagaaaatctgcaacgccgcaaactctacggagtatcgcagctgaacctatacttttggcacgtgtatgagctcatccacgggcggcgcctgaattgttaggccgcaagcccacacttggtcagccttgtacgctgattggctgggacgtgatctcagacccacaaggccagattcctgaagtttggggagtccaagacctgggaatatcctcacttctttcatactccagggcttatgaagtattgacccgtgcaatgatctatcacttcttatgcagaacgaatacgaaaataccccgagaccgacgcaattcatcggcgattgacccaacgactgtctcctatctaagatacggcagcattggaatgcggccggaatgccgtcggcgtgttctcatggtgatgactggcttaagaaaagccccggcatccctgtgaaagcttggcgcattttctccgtcggaccagtgtcttattcgtaagtagacgtacgtagccctacgtatgtctatcggaactatgccatgcaagttcatatcgtgcatacatatgatctcggggtagggatattgatatcgattttggattacattggatgcttcgtttcaccgctctttgcggatacgaggttgaaatattcaaattgttcgatggatcatatctctttcttactacataccaccagaggggtgttcataaaacaagtttcatcattcatgtattgctatcctcgacacgactggcctagtagttgcggttgtcctcacggtagttgtcgcggccgttgtcgcggtagttgtcgcggttgtcacggttgtcgcggccgttgtcgcgaccgttgtcgtgctgctcgtaacgctcctcgtacatgtgctcgacgttcttcttggcgtggtgctcggccttctcgcggtcaagccagttcatgcccttggtctcggcgagcttgtcgacctcgccgccgaccaagccggcgatgagctccttggccaatttgtggctggaaggcttgcctgttttcaaatacaagtcagaagattgtccattaatcattagttagggacgcaatgcgtgtcacgtaccctccttgcgctcgtggtcctcgtaggccttcatggcagcaaaggaagcggcaccggcaacgaactcgtgagagaacttgccctcatggtgctgttcgccgttgtacacctgctcatgtgcccgctcggattcatctagcctggcgttagcatgattttcgtttcaatagccaatggcgtgatgttgggatattgccggctatgcaggtcgggtcggccctagtgcatgcaagctgtaaggtatgtgtctaagggaattcgaacttaccccagccgtaagccattgtgtatatagatagatgaaagtagggaatagagaaaagtttgtatagtgatgaagaaaagaatacaacgtagtgcggggcgatgaggggatcttatacccaggcaagagagggactacagaatactccagaagggctacgtaggtctacggggtacgttgtactaagattcgggtatagctttctcccctctgtctcagctggagttgccccaccatccaatctaccagaatagtggctgagctggttcaacatgtatgggatagatatgtccgaggtggagcgaagacacccttccgccacacaaatcagacacaactttcagggtgttggcccgtggctgaagctggcagatgcttccgaagaacatcctagtgattattgttgcgtatcttcggcgatgcaggcaacttcattaggaccggtggtggaatcatcccaccaccgcatcgctagtctccgacttcattggaggaccacttggacgggacttcctgtcacaattcccgaattaccgccaggggtgttttagcttttgccggatcccagctgaactgctttttggtccccgggatcgatgtttggtcaagggttgccctgaaagacgctacatgcatgcccagcgttcagttcgcccaacaacggacaagtagcatgatgcactgtgtatgctgtaccaatgctgcttccgcatggcgctttccaaaaacttggacatccggtacggagtacaactttcgactcgctcattacgaggacgtgtcccaccaatgtccaatagcatgtcgatctgatggacccggatgggtcgtctcagccctactccgctatgaattgacgaataaaaagatgagacacaggataccagatccatttcaggtcatttatacggtatgcgttacgcacatgtgcagttagaaaccgatcagcctggcttgatcgagccaagcctcccttctaaggcttgtcgtcgccttaaaattctcggcaacaccagccacaagcaaagtggcggtgaacatgtaactgggtgcacttgcaatggcctcctacaacatacggaataatgagcagtgactttgtagaagtagtctttgtattggtaaagatataatacgggtgggctgacctgaaactaagtatgttgtacatagtacttacgtacggagtactggaacatctggctctaagccacactcggactaaaatagcatcactacgacatgtgtcagatcaatacactacttgattagttactccgttgaacaccaccacttaactatagccaacgtatgaagatccctttcccttgaaacaattgaatgtttcaatctctcgatcagcaatcgcgaatactatcacagtaacagtgagatcgtctcccaattaacgtgaaacccttaccgtaaatactctgtatcgtgtccaaactagtagtagtactccgtagtactccgtactccgtactatgtaccaacaaccctccgtggctggaaacatgagctctgcgccacatacgatcacagccacactccgcggcattctctgagctcaagctccaagctccagctccaagctccaactaaacttagctcaactcaactcaattcaaaatgcctaccaaaacccccgccccatgcgacttcccatccgaacttaccgtgaccatcacacctgccccacccttccccgcccgctcccaatcagcatccccagccccaaacatcctactcctactccatggcctcggagacacagccgcatcgttcacaaaattcgccgaagccatccggctcccagaaaccaccatcgtcacagtgcaaggcacagcccctctgcccttcgacctgggcggcttccattggggcgacgatgtctccttcgactccgcgaccggcgcgctagacatggacgccggcatgacgcgcagcacgaggattctggtcgaggacgtcgtgcgggacacgctcgtacagaaatgcgggtacgcgctgcgtgagattatggcgctgggtttcgggcagggcggaatggctgcgctggctatggcgcgggagctcgggctgaaggggaaggaagctggaaatggtaacggtaacgcggacagtggggaggttggtaccctctctggtgtcatctctatcggggcgccttatccgttgtcaggatccagggtcgggaatacgaatcgcaccccggtgctactggttgctggcagggattcggtggcggtttcggatgaggcggtgcgtaggacaaagcaggtttttgagttcgtcgaggtgagccggtatgctaggcggggggatgggatgccctcgaatcgggaggagatgttgcctgttatgcagttctttgcgcgcaggttacggagtagacagggtgttcctgagggcagtgtggagattagctgaacatacagcattacctgtgtaaattggatgtcagttcacgatttcgctttgcggtccgagacatgggtgtaggtgcgctggaagacgcaattgggcacatcctggcgtctggaaaatgggtgactcgataacctcgataatggtcgggaatcgacatatcgattttcagctggcgacattctgtaggtttccgtagtccgaactagtggcatattcgaactatcaaagaggggttacggcgccaatcgacaacgcacaattggtcaggacctcgcattcgtcaattttgatcacatccaagtcatctgatcttaatactctttagtataggttcattgcctagccaagctatgagaaccacctctctcaagaaattctctcacgttctaatacaccaaacccaaatcgcaaaaggtaaccatcgatgatcacagtgctcaaaactacagatatgaggctaagactgaccgcatagaacaaacaacatggcctacaacctctcaatagaggtcttcggttccggcgatagccccacacaccgatcccactggggcttcatgatcaacaaacccgggaatctagaattcggagatctcctccaagtcgaggtcgtcgattcagaccggttgtggtacggttttgcgcctcggtacgccacaaagattatcgacaaagcggctgtggggatgtgcaagcttaccgatctgacgtctcaacaacgacacgacgtgatcaagattatcgagaaggtgcctgctcctaagaattcaattggcctgtgccaagattggatttttgatgctttgttgtctttggagattgaagagtttgttccttccggtacttctgctttctggaagggcatggttggcagaccggcacgagaagttgctgctgcttgtgggacgcagtggactgcctttgcttgatacgtttatgtgtttggatgctaggtcagggcatgggattggaatgattggaatgtcagtgaagagaagataatagtatttgtgatgaattgtctcgtaactctagtatataaaacgccttggtatataccaaggcatggtatggcaagtgcccatgtacatagttaactgctcctttctcgagccccaatgtcgggtctcttcacggtccaagggatatcttcgcaaagcccacttttatgcacctatgttcaaatataaaccaccccgctgtgtactgagactcctcagaacccacagaatgaatcaagcccaaatataaactcccaaccatatctaaatgcaaccgagcacaaaaatctaacaggaatcatttcttaatcccaataacagccagattgcgcggactctggccatactcaaacaccgtctcaacccaacactccttgacagagtcatgctcacgcaggaactgccagcgatccaccacaatagcagcctcaacaacctgagagctgaaagccatcagactccacacaatactgagattcttgcgcgtgtgcaagtactccgtttcatagcgctgcaactcctcttcagacatggtacagatgcgcttcttgaccaactcgcctcggatcggatccaggctcagtttgaccgttgcagcccgtacgtacgcagagaaagactcgaatgcagacttgcggagcgacccaacgatcagcgctatacccccggaatcggggctgtcggtgtggtctttgtagagatcatcgggcacatcgggtttggggacgatgccgtgatctagaaggacgcgctgcagcagagcgcggtagaaatggcgcgtgaagaatccttcgctgtcggcgtggccccagttatgaggtgcctgtacggccattgagcgggctgtgatattgagcttaaaacctgttgtggtctttgcttggtaattttcatagagtttggacattgggaatccgtgcgggtcccatgaagatccggtctttttgaggcgggggtgggcggatcgaaggatggggattttgtatgttgctggccccaatcgttcggttagaaggttgtagcagcagccgatcatggcgattgccacaacagaagggttgagtactagtgatcggactccgtggtggaggaggtttccgcatgaatgcagagagaccaccatcacccgcgcgtcacttggtttcttttcagactgcacgatgacttcttctgtgctggtcctggtttcaactgatgtctttgggtccacgacgtgctcgatgatcggttccaggtagccatcttggatattatgttcgatgtagctgacagtgcctctggtgtcgacctccggtcgggcctttggtacatgtactacatgtggctttctgtacatcgagccgagcacatcatcggcttctagggtcatatcggctagcatgttagaggtggtgtcttcattcagctcagcaggtttttctggcactgcatcgctcaattccaatggtgctcccatattcaagtcaggaacctctggtttttccgcagtggctaggtctggggctagttctggggtttgcatgaattgcctcttcaatttgttgtgctttgcattatgcattgtcttgatcttttcctctttagccagtcgagcatgaacgtccatacgactagcaccgctgatgtattggtgctttcgctcaatggcaatgatatgcttatgatagggtgagcttgccaacatgcgcccaaggtagttctgccccgacccaaaatcaacaatgtgagacaatggctccccgcgacgctcattgaccgtctccgacaaagatgcgacatagcgagagaattgctccacctcgtgcttcttcttcttgttcatgccgatagcgatatgcatcgggagaggttcgctcttctcagatgtggtgaactcgcgacggaggctgaatcgtcgaatgtcgcgaatgtactcgaggagagatgcaggcgggaatgcgcttccgttccaagtcctgccattctcggaactagcgtttgtttcggcgggttcgcacagcgggccaatatcctcccgtagtagcagttgcaggatgctgtggatatcgtgatgctcgaaaaacgatcgccagtcttccggcagtagggatgtgtatagatcgggatcgcgcgtcaggaaatcgaggatatgcacgccaccgcaaaggttcatgaacatgaccgactcggttgcgaatgagaggagggcctggacatattcgtcgggatccttccactcatcggagagtggaagggggtttttaatcgtcatgctagatcagatgtcattaaaagcacggaataagtcgtcaattcgtagaatgagggacattcgatatactgtggggaatgttatcgcttttttttttatcttcccccgcgcgccgctcaaggccgcttagtcatgttcataggtcatttcaaggacgatcatctgaagacaccacgctagaaggagattgtcggatgttatatagcatgtgtacgcatattgcttgctacagggaaccagatggccattaaaacaatctagtcatgtcattgttcaaaggtcatgtcaaagtaagaagattaacataggacaagacgatgtgatgtaaacagaaatgcacagttgagaagggacgattcaggaacacccgtacggattcaaagtccacattcaagttgagatgtagtcggtagctgcagggttgtggaagaagggtaacaccgtctcactttaggctacctaggatagtacaaagaaagaaaacatgacaaaagattgggagggttgtattccgtgggacagtcaatggctatggagtccggatactcagccatgactttcttagagagctcgcacgagaactggactttgatctggtaaaacctgcatggacctcaacaacctggtgatgttgatatccttgtaggtaaagtaccctgttctctgcctgcactgtctcatggggctacggagagatggcggtcgagagggatcgggagaagagaagaagaggaagtggtggaggagcccttttatatggtcacttctcacgtgccagacatggcaaacaacgttaaaggaaggaacgtagcttccctcgtggtcgattgctcttgcctcgctccaggtggcaaccaccatgtctcttctcaaacatctgaaccacaacacaccgcaccagagtcgacgtacgggccatatttgtgtaccttaaagctcatcaggacggacaagagtttcagttgttcggccatgcctcagccctcgatgaatatgtggttgtatctgcctggtcattgtcgcctccgtagtgtgaagatcagattggaaggggtaatttccatgagctttccaaagttgcattcagaagagttactaacagttgattcctcatctagcaaatccaaacaaggccattgctcgatccgtataatcaccgcaaactatcattatccaaagcgctgcaacctacactatgtcaggtttaggatcaatgtctgatacctacatctttagtgagagcggcttgtaaccttttcaaaacataggcattgaaccaaggcccgcatttgcgtaaggcttaagaagagcccatatactgaaccacctaagccaagcttgctccaacgtgcggcaagaaacaatgtgcaaccccgaggatcccgtcgttccacatctagactatttccgaggaagttgaggatttgctggttaaacgtccatcctcatgcaaagagtttgtaacactgcatgccccatacttgtgccaaaaacggagcctcatagtcgatataatcctcacaggcgttcactagatccgtaatatttcccccctaatagcccgagtcgctcatactccagccgaagcacctcatcgatgatatcccaacaagcgtatctcataccgtcaacaacgtaaggagtaccccgtacttgtgatgctagttgggccgtgcgttgggccgagtaggccaaacctgcgcggttgtcctaaaatatcaccgtagagatcagtcagcaacaccgccgctccaggcttacccgtccgtggaccaacccggggccgagaactatcaacaactcacaatacccataccgcagccatggagcacgcagacccattcctacaagttcaagcgtgagctctacaccaactccaagcgcaagtccccaactaatcaacgtaccagcgatgtggtctcaaccctacaaaccagccggccactcttctcctcatacctccgcatccggtcactagccaaaagcccctccaacccagaactcaagcaagcgcgctcggagctcgaaagcacattaacagagctaacagccgacctcaacgacctcgtcgagagtgtgcgcgtaatcgaacaagacccctaccgctttggcctggaactagaggaggtgcagcggcggcgcaagctcgtcgacgatgtcggtgatgaggtcgagaaaatgcaccaggagctacagcagactgtctccaattctgccgtcgacacgctgccgaaccctaccgagtttgatgcggcgcttgaggaggaggagcgcggccggggcggggacgattattatgcctctttggagcagcagcgccagactgagcttatgcatgagcaggatgagcagctagatggtgtttttcgcactgtgggcaatctacgtcagcaggctgatgatatgggtcgtgagttggaggatcaggctgtcatgcttgatgaggttgatacgctagcggaccgagttggggggaagttgtcgaatgggatgtcgcgtatcaaacatattgtgcgcaagaacgagggtaggattcgcttttttattttcccgtttactcctaatctctactggatggacggtttggtatggtatgggaatctcaagttcaaactaacttttctgactagatacatggtcctcgttttgtatcgcagcactcattttcgtcctcgtcttattattaatcctactcattgcactgtgatgatacaaaatcaaggggttagttaaaagcaaaaaaatcaaagggggttggcgtttcgggtgcaaatggtttagtttcgagccttcttgcgcggacgcaactcactgtcttcatcggagtcgtctccgtccagttcctccatatcgaggtccatatcttcgagctcttcgccgatttggaaggattgaactggtcaaagtcagcaggggaacatctgactcgttcgggatctacataccgtagtagctgagcgcatcgggccagaggtcctcggcaatggcaacagcaaggtcatctccatcggggaagatatcgatttcctcaactccctcggtgtcatcttcctcatcctcggagtcggagtcaccggcctcctcgatatcctcgccgttctggatcttggcccagcgagcctcgatctccttggcagcctccttggactgagcggcggagacatcacggccgcggtatccgaagaatccgaagaagctcatgccaacggggctgggctcctcgtcatcctcgtcatcctcgttggcctcggcctcagcctcctcgaccttcttaacgagagcagcgaactcgggcaactttctgcggtcaccgcccttcttcttctcagcctcggcaaggtcgcaagcggcatcgagcatgcccttggtcaaatcctgatccttcttccagttgatacggacgggctcggagaccagaccctcccaggtgcgggtcttgccagcggcgttcttggagacctcctggcgccagtagaactccttgacgagcttctcgttggtgaagaaggggttctcgtcgccggtcttgaactcaaatgtgaagcgcaagctgcggggctcgccgttgccttgggcgtcgagctcgaatcgctcgacgttcatgttcttgaggcactcaccgagcacttgggcatcggtggccaggatgtactcgtcgatctcggggggagcgctagcaaagacgcgcatccagaactcagcctggacatcggggatgttgatgatctcgctgcgcttctggatcaggggggtcatgagcttgacggagtggcgcactagagtgtgtatgttagcaattgggttatcgataggtgcgcttcttaatgcatggtagagtagcctctgcgagctgttcactccataacaaaatagaaaatcaacaggaacatacactgctcaacctcagcacgggcgaactgctcttccagaacagcaatcttcttcatagcagcctcagggatgctaggcatctcgacacggtcaaggagggactgatcgttagacatgatgggtatgtattcgtgaataagggtcgtaagtaaataatgccagacaaacacgcagacttgagtgttaaagacagaagaataggagaatgaaggaaggggaaataaaatatcagaggggaggcaaacaattcagggacacggcaagaaaaaaaaaaaaagccatgcgcgcatcagaaggagaggagctaagctacatgacggtacttgtgggtacttatttttccatagttttaaagcgccgaggatatgtatctcggtgtacccgtgtgtccaccgggcaacgggcaatggtgggggtggccgcggtggttggcctcaggcgtcgaggactacatcataggctgggagatggagggaaaactctgacgctgatcttgtttgcggtggatctcaacgtggccgtgggttatagattgttctgattggtactgggtaggcttggagtcttggtatattgtaagtacatggaggggtagacaggttcgatgctggtggtgtatggggatataggtcaatgttcatagttataggtgggaaatacgaggtacggttatctgcactctacgccgtatgtatgttgtatcctgctttgacagttgacatatgcaggagcacatctcaccgtatgtctatacaaaccttcaagagccctaatgcatatattatattccaatagtaggttttggtaagggtatgcctaaagagataacgaccttaacttaccttctaaattgaactctatgttgtaaattgttgcaaattgctataaacatgcaccgccacatatctcgccacatgctaatcagatccaaatcctcatcctaacaaaaagaagcggggacagaagaaaaggcaaaaaaaagcaagcatacactccaaactaaaaataagaaagaaatactttatttcaacaacaattccttctcctgaactttcgaagagtccatctataccaggtagggagtatatatatacaccgcacaattccatcctgacacctgggcccctttgataccaggtctgacagttacttttataaatcaaccccctttcccattattttttctctcgaggtccgagtccagaacttcccctcatttgatttgctcattgatttgctcatgcatgaccccgttagataagaggagcggtctgcgtgtcgagcgtgtgaatgttcgatgtggacgcacgggacctgcaggactcgtcaattggggtcaggtcagcagacgtgaggcacgaagcacgtttgtgtcatggtatcgattaatggagacgaaaaagagtcggggtgagtccgggatttggatttggggttgttatgtggcgagtttctatggaagaggaggtgaagtgaagcgaaaagaagcgaataatggattttggaattggaaatgaaaatgaaaatgaaaatgaaattgaaattgaaatagaaatcgggcttattagcgatcgtataggagctagatcgcaggctagtaaccgaagtcgggatatcttattccatttgttttcttttgagcttgggatcgaggaggttcattgaaccaagtaaacaagaaataaaggcaatattttgaaaatagaaagtaaaacaaaacaaaaaacacaactttttcggtgatttagaacaaatatcaaatcaaaccaaccacaaagcaaaagaaacctcgtccaatgctaccccaagcatcttccgattaagaaccgaggtcaagtcatgaaagtccatatatcccatgcccgttcgccaaaaatgcaatgattagaaaaacgaaacagatcggaacaacaagggcagcttcacatgcacagaacacatcaccatgcacgtctctgcccagatcgaactgtaaaaaagataagaaaaaaaagcaaggaagtcatcaagaggccaaccacaaagacaaaaacaaaagcaaaagcaaaagcaagagtctcaaaccatccagtccagcccattagcctcttcttctacggggaacacttcacgcgcatactcttccatgtcgcgccagccctgccacagatgtcgagactcgtccgtcacccggagcgagatgacaccgccaggtccttgcatcatgcccgcgccggcgccctttccacccgcgggtccaagacccttcggcgagcccgcggcgggccgtgagaacccgggcnnnnnnnnnnnnnnnnnnnnnnnnnnnnnnnnnnnnnnnnnnnnnnnnnnnnnnnnnnnnnnnnnnnnnnnnnnnnnnnnnnnnnnnnnnnnnnnnnnnnnnnnnnnnnnnnnnnnnnnnnnnnnnnnnnnnnnnnnnnnnnnnnnnnnnnnnnnnnnnnnnnnnnnnnnnnnnnnnnnnnnnnnnnccggggtcgggccgtgagaactcgggctgcgggaagtacggcgcatcgcatcggccaaacagctcctccagcgcctcgagctgttctcgatatcccggcgggatgttaaccttgatctcgatcttgggcacgcggacgtactggcatgggcggtccagggcgcgcgagaacgccgcgcacacctgtaacggggagagggtttcgaaagtgagcgcgatcctaggtggcgggttagctttcgttccttgattctttctcctaggacggtgtctggaaatccgtcccgggtgatgattcccgcactcaccgatggccgttccatttcttcgggccgtccttgaaaatctgcagcagcgtcggaccaacgtcatgctcggcgtccagccacggcaacgggatttccggatcgaacggcgcacgccactcgaagctcccgtctggcagcagctccatctggaagagcgggtatggcaggctcgtgaagttgttattgtagatgccggcgtagacaaaggtggagggcattccgagctggcggatgtagttctcgacggtgaacttgggcgcccactgcgggacggcgggccagggaccatgcacggaatgatccggcatactgctgtagatgtagtgctggattgtgccggcgcgtttggcggcgtctgccaggtcgtggccgatggcgacctcgtcgccggactgggaggtggtgttgatgaaggcgagctgggcgcctttgaagagctcgtccatcagggcggtgttgccgagcagcgggccttgcaggagcgtcacattgggtagttgttggagttctggggcgatgacgcctttcagggaatgtatttgcgcgcgcacggaataccccacggcggacgcgacacggatcagcgaggccgcttgccggcctgtcgcgttgaccacggcaatggtcttctgcggttgtgtcatccgggttgatcgggggggtggaggaccttggtggggggagtatagagggagaggtatagagaaagaagaaggttatcaaaaaggacaagaggacagaggacagataaaagaagagaaatccggagtaggccttggcgagaagggctttgcgatggtggggtagaagttgggaaagttgtatgtaacaagaatcgtgatcggacctaaattatgcgattggaacagtcaaggtcaggagttctccaaattgtccttctgatctgcaattaataaaataataaaaagaaggaaaagacgcaaaggacgcaaaattgccccaaaaaatggcattcgacttccgaaaacgcggagagccagaaaggataagataagaattctttttctacgcgcaccgtcctctattccctgccacgctgcatatcaaatccctttttccggctctgcgtgctatatccaaatataaccaattcccccccatttgcgcatccccgagggagaaaaaaaaagaaaaaaaaaacccacagtgcggtctcgtccaccggtttttacgtaaatcggcaccacacctgggcattttcggcagcacgggaagatcctgattcgggaacttgagtcggttgggagtgtatgatgtgaggtatgtggtatgtcaagtacttttctctatacctatactatgacactataacatcataacgcaccatacccctatgccgatcgacagaactatacaacatacaacatacaacgtacagcacagcatctatacatcacgccaagccttgaatcgaacccatagcggaaccactcccgagggaaatcaaactagcacgtagactaaatcacgcaggtgacttcatagcaccgttcatcgcgaaggacttcctgttccactgtctgccagggacagcctcacgtggtctttatcgtatatctggatgtgggctagggcttgtccaatggcgttggggtcttggcacaggttgacgtgctacactcatgtccgacttgccattccacccgatacgtccaggtaacaaggtacttacggagtgccacggagtactacggagtacggagtaccttttggcacaatagctgggagattacgtctgaatttacgtctgaatttacgagcctgatatgtatcttccctgcctgaacatcacatcattccctgcggcatgagactattttcgagatccatgaggcaatcaatttagtacaacatactccatactctatattatcttgcacgatgtgggtataaaaacacgcaaaagggggaaaaagcaaaaaaacatgcagacagccccctccataaaagagaacccagttggagtaaccccccgactagaacacttctatacaatctagaacattcagctatatccaccttagcagttagcaggcacacccctgtacggagcacggagcacggagtactaacgacactaacagcaaaccccagaaaaccgaaaatgaaaaggagagaaaaaaaaaatagggagagtccttatcttccccacttagtggcttctatccccggctacggcaggggacgatctccgcggatgaaattccgtattctagtctggtgatggtgccacagctaaaagaaggcaatagaagtaggacagggggggttttttcttctttgcgattctggcgtgatcggaatggagtgcgactataacaaaatggtgtcagaataagcccgaggttactctatggtgttctattattctatacacaatgtcataccctatattatctattctataccacgatgtcatcatcgccgacgcaaagcgcaggcattcaactaccaaattgaccggttgaagagggaaaattcccacaaaagaagacgcacctgcaggcttaccggaggccaatgccccttaaaaaaaagagagacatcatatcaaccgaagtataggtaagccatcccacataaagcaagggagcatacgacacaacagtaccccaatcccaaccccaacccctgaacctagcctgaacctagcctgaacctaccctatgacgaaatcctaacctaaggcgccgacccaggaatcatccgattcttaccagcatcccactcccactcctcctccatctcccgctggctgatctctttcggcccaaccccagccatgccccagacaaacggccggtgacgcgccatgagctcggcggctggtcgctcgtccgaatgcaggtgcgcgccggatttgcgcaggaggagcgtgtgctccgagaggcccgcgctcgcggccaggaagagcggggtgtggccggcgcgattgcggaggtgcaccgagccgccttgcgataggaggaggtgcaggattttgattgacggggatgtggctgctaggtgctgcgttgggttagtgtcgagataaggatacggggcgagggagataagggagggggaaacggtgagacgcttacgatgggcgtgttgccggaatagtcggcgtcgttcaggagccagtggtgttctctcttggtaatggcttggaccttctctaggtcgccctgggcaatggcgtatcccagcgatgtgagtgtctggatgcggtcggagagttcgccgtccgggtgtcggaagataggtaatgttgactcggtgagctcgccgcggatggatactgacatgtttttggcgacggattccggggtggattctggcagcgcgaggagatacgcgagcttcgtcaatgcgccctcggttgtcatgtcgaggccggctacgacgcctgctcgagagagactcatgcctgtggcgtagactggactgacgctgcccgtaagaccttaagatatgtcagtcatcctgattggcgtgaagcgttgggcacaactcacattgcgtgatattcacaataacaataccccgctggatagcactagccaagacgttgatcatagcgttatcctgccccgagggcgcattgcccgcgccaaaagtctccagaatcagcccgcgcaagccatccagcttgagcaccgcatccaccatctccggcttgataccagggaagatccgcagacaagcaacatgcgtagtatccagattcgtgcgaatactaaacggctccaaactcgtaggccgatgcaccatatcccagttcacattagtccgcatagaattcgtaaccgccacgggggcacaattcggcgaatcaaacgcagcgaaatcactcgccgcaaccttcgtcgtccgattcccgcggaacaaccgattattaaaatacaaacacacctcggggatcataaaatggcccgcgacaaccaacgacccgagcaggttatccgtcgcgtcattctgcagctcgagcatcggcgcctgcgacccagtaagcacaaccggtttcccaagattctgcagcatgaagctgagcgccgagcacgtgtacgccagactgtccgtgccatgcagcacaacgaacccgtcgaagagcttgtaattgcgctcgatcgcctcggcgatttgagtccagcccttcgcgtcgatcgagctgctgtcgagcagttcctcgaactcgaagaccgtgtaccgcacctggcgcccgtaggctgtcatcggtgtgcgcaggcttgggcgtgctttgagttcgtgcgcggcgttcgcgactacgttcattgttgtgctggcggagccgtcgttgaaggtcggcactcgcgccatgcatttttcttggaacccccgtgctgggatgaagccacctggtgagggttgcatgcagattgtcccgccggtcatgatgattaggacgcgcgactcgtgggaggtctcttcggctttggcggggtccagcgttggtgtgagcgtcattttgatggtttctgtgctgagctgagggttcaggctggtagatatcatggcgaggtcagtttctgattcttgtggtttgtatcgcttggcccgtgacctgcgattgcggtcgtaattttaacgataatccaaggtcaattgatatgaatcaaggcattgatccgttcattcgccgtctgcagtgcgccacgatcaggtgaatagaattttcattaatcggagacaacgttgaaatgaaagttaaaacgttaaagtcactcaaccgcgtagatcaacgattgactcttttggcgaagaagtgaccccaattgaaccccaactcgaattacgtacagcgattttcattggtcggttctagtttaagactttgtccccactctcagcgatctcggagtacatacgtattggccgagtctgatgatttagatattctatgtatcttgaaggtctttagaataagaaacaaagcagcactagtccatgggtgatcgcggataggttaacggtacgaactcaaattatgtagttcaacgctttactctacgaatcctgagtggaatatgaagacaatgactccgtagtggagctatagacgtcattcggaagcatcgagacaagcaacgcaaagcacattggctatttccctttccacgacttctctctgtttcaaccgttttgtgtattctattgccgttaccatttgcgtcggtaatgcaaatccacgatcacagggcctagctggcataagaagtactgtaccggatagtttactatgaggtgaggacaaaaagtgtgaaataatcgatcatctcagaactagacatatgcccccattatttcccttttatcatttcctcctccgtttctctactctccacttctctcaaaaagttcgcctcgttccaaatcacccggggagtttttgctgaaacaagatgtgagcaaaatttccgtagcttacaaagcccggcgaaatcggatttcgtcttcaatgacaccatccacgaatttggtattaaacaaagcataaagcgagagtccttcattgcctcgatttttccaagttgcggttcacaatcaaaagtggtctcgtcgtcgcggaagactgcccaaactgactcatagtagcttaaaagcctccctcgatgaatgtgccagcaaaggtcagattttgggcacacggcttctagaaaagggcaaatggaattcaacgtcggcatcgaaaagcctggaatagttagtaacaatatataatgtgggaaaggatcaataacaactgaccatctgggcgatgggggattttcagcatgattaactctaacaattcctcctctttatcgagagactgccagagtgcgtcatcaacagaagttccaggatttgattctataaattatgaacggatatctcgagaggcggctctagacgcttgttagccctggtataagatatctagtcttctttcttaccgatcctggatatcctttaggacacattcaagttcaccatttgataaacgacttaaaggccgaggtcttcggcgatttacccgaaaaagctgtctttcagagaacgtgtacgacgcggagaagtcgtatagaactgtatcgtaaatgtcatcgggaagtcgaaaatgtatatctccatgggttatcccaatccgatgcagagcatctaggagacgaagtcggtctttcagtaaagaataataccactcctgttcaaatggacttagagacatcatctcaggagtagtccaaggcgtttgtgtaaggatcgtcgcgaagcttttagatagttggtcgatatcttcactaagaacacctcgagagcacaattccggtcttaatgcctctagcacaaccgctcgctcgtggcaatatccaaaggagaatcgagattttgacatattgataaccaccgcatggaattgtgggaaatatattctttcacgggtggaacagaataggtcaatatggttcgagggagttgctccgccgccaattcgtacgaattaaccggcaagattccaaagttttcgatgaacacgtcgagaacttgatttccaatctccgctctgaaactgagcgttcacggtgaagacgtgaaccgtttccgccccgaaagatggctgggtccagagtccagagctagatggtgttggctgggtgtttatgcctttccacggagggccaaggatatgtctaggcagtaagtgatttagggtatgagagcagtacgtagaacttacgctgactgaattggcggaggaatttgcactgacggaagcttcgcatgcaatcatacgaatcattcagacattccccgagcttagattaccatctgatacacctagtgttccacctggtgaggaaaagcaagctttgacgattgtggtgatgagtgcggaaggatgtaaggttttgttggactgaaacatgtacattagacgataggttcatgttagccagatttacaactagaatatgaggacctctgagtgcaaacgcatacactgagctaaaatatttgtattaaggctatactccaccgaggcaaaattcgctacccggaactttctccgctattctcgtaggggacccaggggcaccccattcatgggcttggccaatctgggcgttggtccaacacgaatattcgttcagcatggcatcggaaacattggcaatgtccgatgcatcctctagcggttcgcgagagtaacggattgcccgtccacactggtcgaaccatagcgcaagaacagttcctgcgtcgaagccttcggaagcaagggttattgcatcaacgatatggcgggcagtggaatagtttagttggatacgtcttaaatgaagactacgaggaagaaatccatagcatctcacatatatagggcagtattctggaacaattaagcctaatagtaagcgtgatatagcctgaaatactccgtagtcattcgctagtctcacctcggattaaactgcgacaaatcctcctccaaaagccccatcatgtactgattcccccagaaccaattccccaattgcgcagcagtccccgaatcctgtccctgcacttgagatggatcgagcgccgagaaaccacccccgttctgctcggatatatccgccgagctgacatgcataccgggattatctgtctggaaatatccctgagagtttcccatctggaaggcaccactgtttgggggattcatagggtttgtaggcgctagtccgagagcactgaggtacacatcgaattcctgaccgacctcaatgagatcctggtcttggtctgccgctgtctgggtccgcgtgttagcttcgtagtaaaggcgggcgacggtgccgagcactgagcatagggtgtgtaatcggtcgacggattgagagaaggtgcttagcggttggagggaggcgatgaactcttcgagtcgggcgaggtcgtcgccgttggactttgttattatgttgcagaatatcacgatgaaggggacgaagggggataggaggatgcccctatattagttttgtgagaatttggtctgagagtgtatagccattgcagagacagcgctggttgggatcatgagtgcttaccagtgcatgtaggagattttcatgaaatcgtctgtttcgttgagcgctgcaacgcactgtcggtggatttccagggcttcccgggctgtctcgatgcattccggtatgaaggtggcaacagaccccggatctgtggatgctggaattgctcggtagatcaaagtcatgatagccagccgacttactttgtcagttgcaaggtacatgaggtcgatctcggatattttaagatcggaggccatgaatttctacatgtttcacgttagcaactcgactcaatcaaatccacaaatagcaggaaggtatacctcaaacggctccatgaccttcgactgcatctcagcggctaatctatgtgcatgtgtgactcgttcactttctggtttctgcagcgcctctgggctgtacaaatattggtaaacctcactttggatgattgccgacctagtccaccatatacagacaggcccccatggataaggaacatctgcgctctcatcgagcggcggtaggctgatgtcgtagttctgaatggacgacgcacgtcctagacgcagggacatcatattcaaaattgtgtagaccgaccagaatagatgttgcttttggcgttggactgatatgggatcgtgctccattgaagtaatgcgatgatatcccagtgtctggcacagattcatggccgttgatgctagcgtccaggcaactgatggcttagagatctcgagtgcatgcatagcctgtattggtaagtaaggagtctacatgggttatatccgaaaaggacaaaatggaaagggtgactaacgcctagggccaacgccatgatcgactcatggcttgcaggcatcaggatgttcaaattggcaagcgctgtctctaggttgtcgcgacacatctcaatgcagtgccggtgctcctctcgcgaactggcgtctctctccatgccgccatattcgtagagagcgctgtacaaacaaaagttggttacaacaaatgccgcatcggagtaatcgtctatgcagaagtagacttcacggcatttttcagtgaaatatttcacactgagaaaggggacatagccaccaaagaaggccggtggtgtttctggatgagtaagaataggaagctggagacgtgtctttggaataaaccgcaccttgaacttttctcaatatgtctagaaccaatggtagaggcggcatctccagatcacggatgtcgcgtttcacacctaacctcgcattcttagtaggaagctgactcccctgcgagtctgcttctcgccgttggttttggattccaacaagctgcttcagcgacgagagagccgcgctgatcttcggactggacaaaacctgcggcgagcttttggacacggcagattcaagaaacgcgctagcgtaggccccatgggcagtcagcgatgagctgccctcaaacccagagctgtggtcatgctgctcgatagtaggattcgctagatacagaggacccttaggctttgccgggttcgatgtagcgaatgacggctgcgaaggggttgacttctgaggcgaaggtgcgaaatgagactcgcgcgagtttagccctgtggagccttgtagttgagatgtattttttgctagctgttgaagagtactttcaatgcttgccaggcgttcctcgatcaaatcaatctttttctcactgtggtcgagtcaatggttgtcctatgataggagaaaatgctcatactattgatttgagattaaaacccgccgtcggggctctggtggcttctggcctctgccagtagatcggcatacaatgctggagctgcgacagttggaacatggcgtgcgcttatcgcatcggatctgtgacggcgtgagatcgaatcatgatatcgtgccactagagttgcagctgcatacctttcgcagacggcattgatcacactgcatgcatcattaatatttgattagccaaagccgtatctttcctttctttttctaagcttgcaactgcttagttgtggagcaacacctaccgcacgtcggaccagcgcgcttggcacatcctgtccctcatgatcggattcctcgggctccatgaattttcagacactgcgtatctagccttgaagtgtaacatagaaattgctagaattagagacgaatgaagcttcaaattgcgagcccgggcttggttgccttggccaccggtacgatcacgtggtaggacttttattgagatgcgataccagagacatatatgaatatattaaattttgaggttaatcggcagatatgagcgaacataatatgtgatatcttcatttaacgtgaccagtcatgaacgagagtgacccagcaagcgccgtgcctgttctattactttaatgggcacagcgcgtccagcacacatgaaccaaagtgtataatcaatctatcttgcaaagtgtggtgggatataagcgcgaaaacaacctcggtgtccaatgcagatctatttcttgggaggcgcagggggccaccacgcgccatcgctcagccagactcctgtcggactgtaggatccagcctcggaccctctcaaaaacgcgaatcggaaaaataggtcttctggttcatcatcagggtcactatcagccaaaagaaccgatctaggttcaatgttagtgtccaaatcacgattgactagacgaggatttgtttgtagctccaggccatcatggccatggcgatgccaggtgaattccccgcgcttgtcttcgtcgagatagccgcgccagcgctctacatcattgagaagaagggagacgccgtcgaccgctaggtcggccatgcgatcatgttcccacagagagaatgtgatgttaccattgccgcgataagtgtgattcgaatccaactctggaagggagacattcacggatgtggccgtgatattaggataggtagcaccccaccagccatggattccatctccaagtggcgcttgctctcctagggctgccggagtctcgataattgaggcgaagccccaccgcgcaactccattgatgaaaagacccagcagcagaccctggtagacaagcgagggccgggtgggaaaggcggtgccgggcatgaggagaatggcgaggatataatggtgaattcgaaggcgaagcccaggaaggggaagcaaaaccaagatgatgacacccatggtaccgtatatcttcaaataccgtgggagcagacctccctggcgaatttgccacgcctggcttaggataatcgaaatcacaattgggatgacgagagccaatgccaactttgccccgggttgtttctgaatgtccattggagttagacgctgcaatggaatcaatcgcgcaaaggtatagttgttcagggctccagtgaacagtggaggtaggaaaaggaacaactttgacaactggtagataggcgaggatatcggctgcaacagcggcgcagcacagaacttgtaaagtacgtagacaacaaacgacgctggcagcagtcgtgacagaagactggagacaaggtcggccaagaaaggatacgagggcggatctccaacaagtcccgtatggcagaacaccatgaagaatgtactgaaaaacagcacaggcggtgaagtacagaagagccacaggatgccaactgctgcagcagtgattccaagaagcgtccagcgtggatcggaggggcagctagcttgtggcgaggatagctggagaaagctgaaagccttcgggaatgtcgatgggaacccggcagagagaataccgtgttgcttgactgatgggaaagagtgcgctgcgccttcaagcttgacgacaccgcatccgccatcgttggagattgcaccgacatggattgctgcctggcagataaagctatccgcacggtaaagtgccgggtcggagccatccggcccaggccctccaatgactaggccttggtagttgtacgtattatttcccacaacgtaaggctccagtaatttggtatcacggcagttcgcaggacaccggaagggaatagttgatgaagaaaatggacggcagtcgtttccgttaataccacatccattgtcgacctccctaagcaatcaaatacatgttagcggattttatacctagatggcgcttccatttccgcacgtaccagaagttcgtcgagcaggacagcgtctgaggccgaccgtaaccttcgatataaccggaagaacgcgagtgtaataaaaccaaaaaccaaggcaagaaccaagataaatagagcagcaataagagtaaagtcttaaatttgcgctttgggaagaaatggtcaaggtattggactggaagttcctggaatcgcggaaacagaggtttcaacagaagcatatgcgggggatcgggacccttgacccaattgacggtggcgcgaccgacctttcggagcggtagcggcacccatccccagcgaaacgacttggatgattcttgcaaccagacgggaagagtgctgcctgcctcaacgtccggcggcggcaggtcttcggaagcttcgggatcgttcagacgctcgtcatcctcaagcagcggaggaacatatagcctggcggcttgctctcggccctctccaaacatggcgaagcgttggcttggagagtgtggtgtatttgaagaaactagaatgaacgcaacgagcgattgggtataaggttgccagtggctgaagggcgctagcggtgcgataggcagtggggatctccgttaattgatatgtaaggcggaatatcaccagggacgtggccctgaagcgaatagagcgagctaaccgtgttagacctataacatgaagagataggcgatataaatacaaaaaagacaaaggtatgggaagaaggacagacgagatccaagatgagatctggggaagagacagcgaaggcggatcccatcaggcggccaaggcagccaggcagccaatcaggtcgacccgtgtgatggtgtccacaggtggcaacacgatctctccgccgacaacaatctatcttggggtgatcttcagttcggagaaatttgcaaaatattgcactaatgcagggaaaatcttcggatgtgatctgagcttttgaaactatatcgtcgttccaccgtgctgtccgtcctacactgtgtgacaacaaggccagggatcacagccctggtactgaacgagggaaaagacatgattggttgagttcctagggctttctgagaaattgaagacctcggttccatctgaactggtacacttgcgtatacgggctactactcttgggcagtatccacgtatccactccatcgtcgccattctgacgttgccactgccaaaatagtatccatgggaacaccacgtggaagccacctggatgtacaagcttactcgcgtgggaagagcctgactctgacggtagcagatagaaccggcagaagaaatatggtacatatagctacttatggaagtaggtaggtattccctggcttttcccttcttcttgttcttttctttttcttttcttggttttttgtcttgttgttaacttatcttgttgtcttgtcgacttggcgataatttggtaccttgttgaggagcaaggattttgttaatacgccgcaagggtatccaggtgtcaatatggagaagcccttcgaatggtggtcggttgagcgttgatgtcagaaggtggtgtaagtgtttattttccagagtcagggtcttgattccctttgttgtattgctccaagttgtaaacagtaaagtcgggtttgaatcttgatgcacatttcatatcttgcagcagcctcgttatgctcatttccgtgcatttcagatatttcagttgccagtggttgagagtataagaggaagtcggatttgcgtgaggtcatgatgtcaaagtagcaaagcaaagcaagattgaagagactgaaaagacacacaagtcatgcgaggtatgttaggaatgccctgcttggttggaaagtacccttaagctcaatgagaagagcaagaaggccttgtgatgagagtcacatggtgacagcgggttggcaatgtatgaggctctgcatgtataaaactctagctaactgctatagacattgaagactgtgagcccatatatctaaaacagtcagccccatgaggtgacaatggtgaaggtcgattggaaatatagatggaaggagtaagggtgtaaaaggatactcacgcccttggattgacgccaggcccaaaagcgtctggaggttcaacacactagatagataaatgataatcattttagtggactcaattccatggtgttttagttgagctatatggcatatgccaccactcggtacggagtacggggtagtgaactgtgatttacgttgaaatatcaagcaaagccaagaaaaactatcaccgagcccaggattcgaacctagatcgcctggggtcctaatacggaaaaagaacgccaagaagtggcagtccatagttatcgaaataggtgcctgaatgcctgaattaactgtggggtcagccatggactctcacaaataattaaaacctcaccccgcacgagcctcaagctctgcaaccggcatgatgcctctagtttccgaaaacgaagagcttgccgaagaaatcgaagccgtaaacgccatctacgatcccggaacagtaaccgtaacgcgcacgaccccggcaaatgcgacaaccaacacacttgacctagggagtcccgcgcactccaataacaacatctataccacagtggtcaccctccaaatcccagaacaaccccacctgtcctttatcctcggcttcgaagcctcatacccagactcccgacccgccgtactgggaacagcatcaacagccgcacgcggggaaggcaagatcgccatcgatgtattggaggagatcgtacaacggacctggcaggccggcgctgtgtgtctattcgatgtaatcagcgaagccgtcgatatattcccggaattgagtatcggacaggacgatgtcggggactcgtctactcagacaccaactgtcgacgcgtcgtcgaccgccacagaggcctttggagctctgtccctgcgcgacgccttcggcctcgatgccccgcccgaatggatcctctcggacgtggtctccgagaagaaatcggtgttcgtgggccgtgtagcccgtgttacttgtctagcgcaggcgcaggcttttcttgatcatcttacggctacggatcggaaggttgcggccgcgtcgcataatattagtgcttggcgtattcggcacaggaagggtggggatggcgagggtggggagactgttgttcaggattatgatgatgatggggagactgctgctggggcccggttgttgcatgttatgcagttgatggatgtgtggaatgtcgtggttgttgtttcgcgatggtatggaggcattcaacttggtccggcacggttccggctcattaatgatgctggtcgtgatgctttggttaagggtgggtttactaaggagcgagaggaggctgcggctgcggagaaaggaaagaagaagggcaagaaatgaggggactggtgatctccctggtgatttttgatgctctggactccggagacccccaaattgaattcatttatatggggattctggcccgcctaaggcggacatgatgaaacacccgggtccgcatagccagggtgcttgatgcaacctcgaacaggcagcaaccgcactgcaactgcggatacaactttcctccttggaaagtgtctaagactttatgtcttatcctaagactgggatttacgacaatggcaaattagtggtgcgtggcccgtcatgcgacactgtctacgaagtactgacaacaggtaatgctgacagatgatccaagacacagtctagcatacgatgaaagattttgccaactggatccagacaaagtcaggccagtgcaatgagccattcagggccacaacctttgatgtctgttccgggaaaagcagcaggcgtagaacgaaccaatcacgagccgtaatatcattgagatttttgcatccaccactactacatacatagcaactttcgtccgaagtgctggctagcggttctttgcctaggaaatcgccttctcatggtgcttgccggactgacatagttgatagttgtttcgcccgatgctccgcgattcctcacgttattaacccttcatcccgagacgctttgtatgtattcatgagatcttcacatcttccatcgttgctgcaggctgcaatctggtctcacgcaagaccagccatgccgcgacaaaactgggacttttcgcctgaggctggctgtgagtatggaaagctgcgcctctcgcataccattgctataaaagattgtagatatcctaaacgggtaaaactgcttacaacagtgggtataattcaaccggccggagccgggtggtggaccctgactatgttggaagagcaattttaagcgattcgcaaacgagaaatccactgccatgaagccaaggaaggcttggccaaagtcaaccagcggagccgaaggatcgacagaagcattcaggaaacagcaacgaggccatttccatgcaactgccagttagttagcggtgatgactaccctctgggcactgtgcctagatagcgctgcaatcccgctggcaacaaaacacgttgccaagccttggcaggggcggccccgcttctaacggggaactcttgggccctgtgctgagatttcccaccttataatattgtatgccggcaaggattgagggtctcacatgttctttcattcatgccagtatgtgattgactctgtgtactagcgcatagcccctatttttgtgtgtcttgttttcgattaccaaattcaatccttctccgcatcgtctagaagaatccacgggttgtcccgcacccttgcgcgtgctcatgatctcagatgggtaaactggacccgtgcggacccctgctttgcatacgagttcttcggtgccctccgcaacgagagtcggtggctagtgagctgggtcctgacctggcagagttgcgaagaaaacatcctctcggcgctgatatggtcagcaacatgtccacttcggcaacctggttcactattcgtaattctgcccccaaggtggatctcgttgctgctacagccaacaagacatgtccagggcaatatggcgtggcaatcaatatgactgacaaaactgtggaggtcccacgtgggtcaattggtctggcggtgactacaccaatgacacatgcgcagtggtggtgtccacaccgaatcccacgctggatccttgtcgcgtcgaaattgacaagactattgtcgcaagtatagaggcctctttgaaaactcgcttatgcgccgattgcctaaggatgacaagaatgccgcgcaacaaatggctgtggctggcgtatcctgcgtgctggctgcatttggggccttagttttccttcttccgtgaccatattcctgcgttagtcctttgatacccgatgtcctactcttgctacaaggctgtccctttcagccttggccgtagcaggctcctaatggaaaagtagatgccagacatctcgtagtacaagatcggtttggctgccgggttgacattctcttcgcctctaactctcgcgtagcaactgaatcgagcttgcgagttggaagccacgcccataattaggcgctcgcgaacgacttggtcaatgtgacacgtcggtagcacaccgtgtttggcaacatcgatatcaggtctttagtagccacgtaggtagaacatgaaacctccttcacatgtaaatcggcatacgaacggttagttccgggtttcatgcccgatttcaaggatataccgactgtaagcgcttaaacagaaatacaacctcacgggaaaagagccgaaagtgatatgcggatggtttgattgcgatagatcagaggtttaactagttaattaattagaaatagttaagaattactaataagaattaaggagtcacatttaaggaatagtggggtttgcaatatattaggtcaacatatatcacgggaataccgaggtagacgataagattaacagacaagctacaacgctgaaatgaagctcaaccctttaggatttcatttcctagatcatgaaagtccatatattctacgctataggctaggcagccagtattgtttgaaattttagggagcgctaactcggcgatttccactggcttctatattggttctacggagtagccgagttgagactaagtgcatttggtggagctgcgtgatcctacttttaactgctccgtaatacttttaaaattagtgagatctctggagatcttgccaagattgacacattcacattgctaaactaaaggggaaagacaaagttccggtgttagatagattggaaggctgaagagacgatggcttgggttacattgtcccactgcgtcattaagggcttgaagagcactactccggtgaagatgaaacacacccgtcaacgttggcaacagaagaacagcgccaatagggagttcatttgccagcggttttgatggtgcgacgaatccaggggcttgtctgtgcggtggttggctcttctccagccgcccggcttagtcccagcgggtatcagcgagaagtctctctcgtcttcctactggtcgtctttttagttttcgactaggaatcagctttgcactgcaacctctgaacttcagtggacaaaatgaggggggaaataggagtctgaaacatccaccccttggccttccccactatctccgtgatgtctctgcactttcagacgtgtcgggttagccactcagaggctgggattggggatcttcgagaggcttgcagggcccgagagacccatgtctgtatatataattgacgccaacgccatccctctttttttcctttgcctttacctccattctcttcttacttcgatcaattcggcattcaggctagacctgtgtcactttccttctttccatcgatttttgcctgtggcaaaacatcatacattcctttttgaagcccatctttgagacaatacaaagacgccctattgttcatcaacaaagaacccgggaaacacttccgatacattgaatcagtgtgtttgtttcattcactctgatacaaaggtattgtctctcctgcctttgtttcatcgttgcctcagatctatatacgtctgatctattgtgggaaatctatcatctattgaaggggacatctatatgccttgcctacaatagacaataggcatagacctatcaatgagacactgtcgatatatatacccccaagcccatcatgttctctgttcaagtctctcattccatgctaacatcctactacaagatccattcctttctgacatctgattccattcgtctggcacgaatcgatcccatttgcaacatttgtctatccaaaatctcaaaccccaaaaatttcaatcagccaagatgtttatcacctccaacttcatcgctgccctgatgggcgcttccatggtcaacgcccacatgatcatgagcgtccccgtcccttatagcaaggacagtctcaacaactcgcctctggcagcagatggcagtgacttcccatgcaagcttcgcgataacgccttcgaggctcccgagaccgagaccatcatcgcaatcggcgagtcgcaccctctgtccttcatcggcagcgccacccacggcggtggttcctgccagatcagtctgaccaccgacctgcaaccctccaagacctccgagtggaaagtcatcaagtccttcgagggtggctgccctgccaatgttgatggcaacatgtctggcggcgccgacgtcgtcgatccctactctttcaacttcaccattcccgacggaatctccgctggcaaatacactctcgcctggacctggttcaaccgcatcggtaaccgcgagatgtacatgaactgcgccccaatcactgtctcgggtggctcctccaagcgctcccctgaggaattcgagaaacgcgctgctagtttcccgcccatgttcgtcgcaaacgtcaatggctgcaccaccccggagagtgtcgatatccgcttcccccagccaggtgacgatatcgagtatgacggtgaacccgctaaccttgccgcggagggctccgaggcttgcaccggtaccgctaccttcggcggctccgctatcactgcttcttcgagctcctctagctctggctcggaatctggctccagctcatccgtcgcttcctccagctctacttccgcccccgcagagagcgcctccaccgcagccaccacggtatccgccgccccagtcccagaagctacttcttcgagtgcacccgttgaccccgagcccgtggcctcctcaacaactgccgcagctcccgcgacatcctcttcgtcctctggatccacctccggtgccctgacgggtagctgcagtaccgagggtgagtggaactgcatttcaggcacctccttccagcgctgtgcttctggcacctggtccgctgctcagcagatggcgaccggcacggcttgcaacgctggtcagagcgaggagcttgttatcagcgctagtaagaaggcgcgtcatctctccagcatgcgcttccgtaatcgcgcgttcggtgttcaccatgcccactctatctaatctagttagatatggaaacagtccgctagtttcggatacacttcgtccccatcacgaatggtttttttgattcttgtctcttattgctctttcatttcttctgggctggtcctttcgcttttcggtgcattgtatgttcctttcttcctgtacattaagagatgagaccaggaaaataggacatctcaaaggtttcgacataaagatatccttgtacactgtgttgatcgatgttgtagcatatgtaaaagtctagggtttgtattgtcagcagtctgtagagcttattgctcaaataatagtgttgtttgtcaatgtccattgggaagcttgatgatagacaaagtcagctgcagaaataccactgcccacgagtttagtgggtcttgacaagtttctagatgtagaatcaaattgtagagacagacagtcacatcttcagcatgtttgcctctactttgagtaacggaacttgcttgacttcaatgttgaggatcgcacctgccagatatggatagacccacttgtggatccacgtgatagctcagattagctaattgctatatatcaacgctagtccacaaatggcaggaagggcttagggtttgccgccccaccgcattttctcactaagcgaaaaaatccacaccgagttgtgaagccccccgactcagacagattggatcttcaacctcacctcgacaccgaccagcaacaatggcctctcgcccgactgtctcgatcgccacggctgcgggcaagccctccggggcctcccacccccttcccactgtgttctctgctcctatccgcccggatattgtccagtatggctcgccaaaatcttgaagcatttacaaatcaatggaggggaagtgctgaccgtcgctctacaggcatgttcacactggtatggccaagaacaagcgccagccctacgccgtgagcgagaaggctggtgaacagacctccgctgagtcctggggtaccggtacgttattggcacatttttcgagattggaaggattggatcgaaatttgcgaaaatttcgcgatcgtcaaattcttctctattgagagcaataactgacagaattgcttttcatcgaataggtcgtgctgttgcccgtatcccccgtgtctccggtggtggtactcaccgtgccggtcaggctgccttcggtaaccagtgccgttccggtcgtatgttcgcccctaccaaggtctggcgcaagtggcaccagaaggtcaacgttggccagcggtatgtggaatccaattcgacgaatcgaacgcctagagaatggaggaactaatgaacccgcgcctacagtcgtttcgctaccgcctccgctctggctgcttctgcttcccccgctctgctcttcgcccgcggtcaccgtgtcgccaacgtccccgaggttcccctcgtcgttgagtccaaggctgttgagtccctgaacaagaccaaggccgccatcgccctcctccaggctgtcggtgccggacccgatctcgtcaaggtccagaagtcccgcaagatgcgcgccggtaagggtaagctccgtaaccgtcgcttccgccagcgccgcggacccctcgttgtctacaaccccgagaccgacggcaaggacctcgtcaaggccttccgcaacatccccggtgtcgagacctcgcccgtcttctccctcaacctcctccagctcgcccccggtggccacctcggtcgcttcgtcatctggacctcctcggccttccaggctctcgaccaggtctacggcaccaccaccagcccctcggctctcaagcgggattacctcctgccctccaacctggtggctaacgctgacctgacccgcctcatcaactcctccgaaattcagtccgttctgaaggcccccaagggcgaggcccgcaccaagcgtgtcaacgtccagaagaagaacccccttcgcaacaagcaggtcatgctccgcctcaacccctacgccgctgcctactccaagcagaagcttggacagcagtccgtcgatggtggcaagcctactgctcctgccgcggctttcctcaacactctccacgaggattaagcgggtctttatttgcccctgctcttttctttgttaactgtgtttcgttggcaaaaccgtagtcagcaaaaatgaatcaatgccttttttgcaatacccatgggtctatttggagtagtaatgtgatcggttttccgtgttcttctaagaccctcgaattttttgtatcgtgcatggtaagtgtagatgtaatatggtcgaggttctgtctaagatcatcgtttatatggaggtgaatgtcaacccttccgctgattacaacctgactctgatcgagcatgatgactgcctttttcaaagctcaatatgaagaactagatctcgttcttttccacggtcagtataaccttactgactagcagccagacacttctcctttcctctccttttcaattacttccagcttctatccagtgaaacagattacttgtctcttgtagattaccggtcgctcgttcgacatccttatatcgtgaccggcaactcacttggctatccttggtggtttgcaacgtactcgccatgaattcaggtgtctagtttcatacgaaacaacagacgagaggcccattatttctttgtcgtagaaccaattaacacctcttaaataagaggaaatttcatatatatctgtacattgacatgactattttccattattgtcagaaaatatgattattggaataaattattttcaacatctaagtatatagacggaggtgcatataaaagtcaatacgtccagagtaaccatggatagagatgcggctccttttccgcaaaacttcttaaagtacaattataccgagggattcagaatatctcaattgagactggacaaatactcgaacataattgacaatgtctcaacccacagcgggaaatatcacatgccaacaagtttccttacagcccacttagtaccggtataaagtataaacccgatgcaagcacggaaactatcccaattaattcatgcagataagccggcaagtcaagtgaaacatacatcatgacttgctgagttagcgcgagtggttcgataaaaagcagcttgtaagatattgattggtgtcgtggttattgagtttcggcatttgcagaggatagatagcaatccaaagaaaaagccagcattactgaaacacgggatataaataagcattccaatgtcttatttcggcagcttcacatgtcactgcttgtaatctaattgacttttcgtctgccccgttggttccttggaaatagataggttttaggcatatatacggagttccgtatagcgccgggacgtgaacaatggtataaagaataaagtttgtgttcccttctatgcacgtttctatcattttcggagttgcgtgcaccttgaaagttggtcctgcaacaaatatctacgaaccctctactccgtacggagtacaacttacggagtacaacaacaacatactccgcagggcacggatcaagctcgggaaatcccaatgtcaatgccgatgatcacctaagcggaatacctttttggatgtcgggcacggagatcagggacgtgccggggtagatgccaaggaaaccttcaggccccagggtccgcaggtgatacatacataactagtcgcttgcgagtccgggatcttacgtcagttaaagagctttttttagtcctgcatgttgatgctattgtttttactgtttgagaggtcacatgtttaaggctgtatgttgatagttagagtatacggagtatatatacagcctttcaggaatccatggatacatacaacatagttatgcaagagtctgggatagacatgtattctagtaaagccgcccaatcccctcagtcaaatatgcaacactaatcaggaacatatagccgagagatcctgaacgccccaagccgtgcgatcggagggaaaaatctccgatccgaagaaacaaagagaaaaaatatataaaaatataaaaaagaaacgaaacgaaaacgtgtaaagagcgctctcggtaagatcaaccgacggataacctgcacgagcaaggagaaaaatctaccttgtgggtaaataaacgcccgggtctcgtgctggtctctattcgcagatcacaaagcgggtgcttgtctaagtataggcatgtctcacttgagcagctaacacaaatcagttcaggggtgcagagcgtgttggcgctatcaagagtcaatcagacactagctccgtgcaaaacatgttgcagtagtaatgttgcaatacattagtgtctaggaggaatgaacacggtaggtttatactcctccgtatagaattgagaagtgtttctaattatttagcttatttctttgttccgacggcaaactccgtagaactgttcacaaagtaactagaatacataactagctgaataaaccgaataaactcagttacttcatgtggatcattgtacaggttgtctctagtcgctccctatacaaccgatttcattggacttctacgcggattaatcctccgcccaacccaaaaatttggagtctcggtatttgctcggagaaactagatgccgtaaaaggaggctactccgtataggaagctgacatctctaaactgccgagtcttagaggattaacggcggaatcccgatgtcccgggtaactcgcgtcatttcacgggcctttcctagaacagaaaacgcacactccaggggctgagaccgtaccagacgatcccgaaggcttgcagatctgatcgccagaaattgagactgacaacgtattacgtggtcaattccagagttgcatcgccgttggactaggatgtcgagtggacacttggaagactagggttccctgttgaataaagaatgtggtaattgtacgggcatttcctataaaacactacataatctgctcgtaagaaaaaaatctgcatagatacccatcctgggtagttcgctccgaagaattagaatcctgagccacaaaataacctctttaactatagagtactccgtatattagttccaatttggaaacttcgggtgcacaacagccactccacttgcggacctgcttgcggaccaagtcgattctcaccatatccaaacgtaagataagccctgcggccccgacactgggaggagattttcccgtctaggcatcgaatcgcccaagccaccatccgaccgaagcccaagggacccactgtgagggtattcgcggtattatccgagtccaagcttactgcgctttttccccttataatttagtccctgctctgcaaattctaggtttgggcgtatataaatcttaccgagtatacatacataccgatgtgcttctttgtctacctgggtggatgcccgtatccatacccttgtgcatgtatcttgcacatgctggttccaaaccccgaaattctcccttgtgcgcgtctcatttaaatgcttactagggcatgaaattggtcatgcttagaagtacttgcagagtgggtatgcaaggccttggcgcctaaaaggctagaatgtatggagtacgaatatgtaatgtagcatccttgatccctgtggaggattcgccattaatataaggatgcggcagtaaagcggatgatattcggggagatttccacatttcccctatgtttttcctataatttcccagatatggagtatctagtactcttcccccacttgagagaatcaatggtctataattgtcgttcacgatcccgccgcttctatgtgatatgccaagtttgaacacccaatgccgatgtcatatacccactttcaataatgatcctttagaaatctctccaattatcttcattgggctctctagactaaccttctaagagacattgtagcgccctattcctaatgtggcatctttggagccgcctaaaccgaaagggctgtaactgtctcatttcaatttcgttttgacgtggagaaggctgtagattgagttatattccgagcagctaaatctgatttatattaagtaaaggtgaccgttagtacttttggtaattttgatgtactcggaatacttgcaatacttagaatactctctcttctttggctctttttcgagttccatacctgaattcccctcctttctcatctttgtccattttgacactttcgttctattcgagcctcgatttctttaggccatttcgttcctttttctgggatccttgctataatcctctgaagaaagaattgcttgatcctgcaggaggggaaggctgaggctcgacatcgggaaaggttgacttgcagagaacgtcaaatccatttccactcttagtggaatctacgaggcgctactcctagtggtcttttcccctgtcagggtgccactaactagtgggagacgcttcgaggctattttgtcccataagctgtgtgccaccatcggccaccatcgaacgttccggttatcgtctttgctatcgtgtcatattgcttccttttttgtccatcgcacatctatttgggatttgggtattgaagacgctttcggcgctattctctccaatatccttggtggtatacccacccgttgccgccactaatccttagctcttcgaggatctgtaaccgagatctcgctgccatctgatctcccccgctccaccacatcctagcattcaggagtgatctactgggtttcaagcgggtttccattgttgctaatatcccggcccggttctccgtgatcctgtaactttatagacgctcgtgtcaatcctggcaaatccctggacgttggcacaaactaccgggatactgcagacaccctggcacgaaaaccatgcacctgagaccgtgactgctcgggactaatgcgagatggtggccttttaagctagcttcaatttccttccctgtcgcagattggtgtgggtggactatttcgagcgccaatattcccatcaacacccgctggaatcctttgtacaaattcctctccctcatcttcgcttcgagcttggaatgtacacgatcaatccatctcgctttgctgccacctgatccaaatttgtccgacactccactcaattctatcactgtaccttgaatatcgaaaattaaattggtacgtgaaaagcgcctacgtcccgatagagagagagctattgctaagtcgcctggatcctttcaatagatacccctttctgggacctgaacaatccaacagaaagccgaaattcagccgaagacgatctcgttgactcgttccagaccaagtcctttccttgaaaccatccgcatttaaggacacaaagccaccgagcacatcatcacactggttgttgtctgggtctgttatgtagatggtcaattgtgtaaatcactctgaccccacatatcattcgccatgccaacctcccaaggatcaagaggatctggctccggttctgccataggcccacgttgctacgttggacccttcggtcgtatgttacccatagatggcccatcctcggagcagcaacccgagcttccagctaatttacaagaaaccggggaacacctataccagcttccacccccgcgggtaccgactagtttacaatttggatctgatccctttccacggcagaaaaacagtcccgagcgcaaagacagtggatcagagtcccagaagccggagcaacttccctccgtgaggcagatactcactccaacaccggggacaaattcattgcaatactctcaaccatttgcaagttcgacactcaacacaggacgtcgtggatctgcataccctcactatcacgatccgactttccaggttccatcatctgcacctgatagaggccgtgctgaatctcttccgcaactgcacggtctgccttcattgtcacaagtgggtctgcagggccacagaggcataagaagccagacaccgacaagaagtgatccacccgctgcatcttttatacagctaccttttcacacatcctcgcatggtcaaataccaaatggggaactatcatcaccggaaagttcaaagcggtcaaataaccagccccttcgccctcatgtggtagacgagcgagtcatcgacggggaactttgcttcgtatatgcagacggatcgtcctgccccaaattcatcgacggtacacccgtcaacgcaaattgggggataacgaaggccggcaggccgagaaaacgccttggacttgcctgcttgacttgccgcgagaagaagattaagtgtaatcctaacccaaccgccgaggccgtatgtgatcaatgccggaaatctggacgggaatgcaggttcgaaagtgcgtaagtgcgatcgtaatctctgagaatatgcgtccacggacttacctcgttgaaccattgctgatccctcaaagcccgcggggtagccgtcctcccatgagaggcccatctggcagacccgactcttacgcccccaccagccacggggctttggacgtttctccgtcactttacgacatcactcgagcctcggacagtgcgacctcccttcctggaactaccggccactcaccgatgccagagagctcgatgaagacgccgtcatcccaagaagccacttatgaaacgatgaccgaggcggacagaggcttgagatcccgatcctaccaatttccatcgcccttatccggtacagatgaaactcttggacgaccatcgccacatgccgagtctgttcgttctcctgaatactctgacattctggggaaactcaaggacagcaattcggacgacccactcgcggcgtcctggaacctggacccgtacgaaagcgacccagagtccgtggctcactacactgagtgttatttctcgcacgtgaatgacggtatgtgccacatgttcccgcgtggacgattcagctcgtggttgaaaacctgccccatcaagtctgcacacgacaagatgctcctttattctatgatggctcttggatctgtgttctccgacaggccagaaaaaatggcagctatgacgcgatattctcgcatagcacgatttgctatcaatagaagccagcataccctttctttgcaactcgcccagagccatatcataatgagtctctggtactacgctacggggtcgctggtcggatcttgggactcgataggcgcagcgggaagagcggtctttggacttcgttacaatgtggaatctggcggcgttgttgtagaccacagccaagtttgtgaatacgggttacatccacaggccttgattgagtgccgaagacgaactttctggattgcctttgtgcttgatgtaagaaatcgcgcatcccccgatcaggaactcaatcctagttactgacaactactaccagcgcttctcgagcctctattccgcttcgtcgactttcatctcgtcggatgcagccctgctgaggctcccgtgccgagaagaaatatacgagactcagcagtacgcgacagtcccatatttccaatcatttctcaatcacaccgcagcctccacaggcgatgaccgctctaccctaagcccaatggcttttttaatcgagatcatggctatttggggggacatctcgctccatataacccggctaccacacatccctcttgaagcgtacaaccgacttgccgaagaattcaacaccaccatcgtccaaaaatccaaccaatggatgacccgactccccgaatacctggcattctcgcccacaaacctagaacgaagcatccatcaaaaaaatgcagacaccttcatttcaacccatttgttctaccacgtcagtttgatgaaactgtacagacacgcccgctaccagagcctccaacccgaaatccttagccaatacattcaccgcgctcggtaccatgcggtcgaaatcctccgcatctctcttaccttcgaccagtgcgccaaaaaactcacaccttctcgaaacaacacagagacatccatatccaaattaacgcccctgaaccccttcctcggctatgtgatcctatcagctgtggatgtcctcagctccgctggtctggcgtctcagttgcatgagtgcatctattatattagaggtgcgctagatgccgtccacgaactcggccgttactgggacagctcgttgcaattagtcaccgttctccacagacgcctgagtctgatgatgacttgcctgaatgagcgcagcgtcttcgctgagaaacagggctttgctcttgatggcccgccgctcgagacgaaggtccatgctggcgctttgcattcccatccgccttcgacaacgggcgatgatctttttactggttctatgcctagagaaatgattttgaatgctctgcggcttgatgagacacttatctcggagagtcgtattgcttggattagagatccatgagaggattttcccctctcggctctatttccctcctcctgttggcctcctctttggtcgggctccggaattggtgtgacggcgtgattgatctcctcgatatttttgcagtggtaagggatcttgttttctcttatcctgttacgatgtgatggatgcatttcaataatgatggtgacttcgctgattgatttgaaagtatcgttgctatgtatagatggaactgtgacctacatgacctgactttgccttttatttgtatattatagtatgtcatttaatttctgctttctttgagcgagcgctctgctactcctcatgtaccttatatcttttgggagacaggagaagcttaattgaagccaatgggataaatgaaagagtgatttactaatgtttcactattttattacaaaatcatatagaatgctatgctgctatgatactgtagttggaaactgccctgaataaataaacctgtcttcaacaagatccatcaacaccgcgtaatgagtatcttcattaacaattgggttcgagcaaagccacccaagcactgtcccaagagtaaccgacacttcagactcgggatcttccttcatatttcgtttccactccagatgaattgacggggaagagtagcatcctttaagacgttgctagcagatatcttcaatgtaccaaccgttttcgcaattatctatcaaaagagacatttccacccatctatctaagtaatatgaaccgcgagacacatgagatctacttgtatatgcaatactgatagtactcatactaattaatgtccacgggtggtcacatcactccaattgccctaagccaataggaatggagtctcgggttggcacccgagaacaaagccattgtattcaaatagtcaccgggtcgatgtttcatattctataaactcgacatttgaaaccaatatgggattatctacttgataatgagctaactaaaatagatctgcagtatatcatttcccccagtcaatgctccaccataacacctccgagcggggattccaacggagatgcggaaggtttctccggaatttcgatttccctcctcaccttgtttcattgccctatcgcatttcatccaaccaccccaaaatgaggatatatatatagatatcaaaaaaaccgagtgcgtgaaaagctctcatgtcctctttcaagcagcccgggacgcacgagttccccggcgcggagttccgcacgacggtggaagatgacggactcgacgccgactatagcatgatcggcgactacccagaggaacccgactattatgtccagctgggccttgcgcgcaatccgcccccaacagacgccgagatccgctccgcctaccgcaacttaaccctcagcttccaccccgacaagcagccgccgcatctccgccatgcggccgagagtcagttcagacatatccaggaagcgtatgagaccctcattgatccaaataagcgcattgtgtatgatatatcgggtgcagcgggcgtgcggcaggaatggggtcagcgcggagtcatggggattggtggggaggcccaacggctggatgttggtgttaaggcgatgtcgccggatcagttccggcgctggtttttgaagacgatgaaaaaacgggagcggaaagccgtcgagagtttggtttccagcaaggtatgcaatttctatattgatcttccttgggaagttgcgcgaatgtgctgttgctgacatccattgggcttggtttagggcggtattaccctgggaatcaacgcggcatctatgatttccgtcgacgaggacgacgatgtgcagttccatataccttcaccgaaagtgacatcatatggtgtttcgtatagtttcaagacgccggtgtcattaccacagctttggggcacggcagagaatgaggaagacacctcgggtgtggaaccggattcaggggaagatgtgccagacgaggaacaagagcacatgcatgtgatttggaatgcaggtgtaactggaggtttggctcgcccgatcaagaaagtcgctgttgagtaccaggatgggacagaaggagaagaaagggtatgatgtgctgcatgttcgcatctcgaaatttcgctaaacatttttcagatcgaaatgccaccgctcctggcaagtcagaatttccaatttggggccactgtgactcccaatatccaaaccctggtaggcaccaagggaatctgggccaaacatcctttctctctcctcaaggattcccaaatcagcttcaatgctcttcttctccctgccccaaccttgaaagcaagcatcgcccgggctttccagccaatccccggcaccaagccgttccaggtcagcgtgaccagtatacatacgcgctctttgggggaaacggcgccttcttttgagattcaagtctccagagaagttgccaaacagaagatcggcaccatgacatggaacagtggtgtcgttcagtggcccgaatttcttctcagccagttcccatcaatcggaatgggagctcagagtgccattgcatctgctaatgaggtcagtaacctgcagttcggtctaatctcgctccccaagcagggccaagctgcaatcgatttcgacgacgacgacgaggagagtggagaaatggacgaggatgtccgtcatctgctcaagaaaaaacgccaaatcgaccaatctgccgaggcatggcagacctatcttcaggtcactcccggcggaggcgcttttgtcttgagttattctcgaaacctcttctccgggaaacccgctgatgatccggtcaagactgaatggagctctgaagggtacttcccgatgccgagcatggaccaggcccgtgctgtgcgactcgagatctcgagtgttcttgggttagacatgactctcaattggaccattaagggtgttcgccgggttggcgagtatacgcgtgttgggctcggtattggcatcgcagacaagggtatcatgatgacagtttcatggcatcgactcggtcagaatattaatattccgattattgtttgcccggctagtgaggcaacaagcggagccgcagcgctgaccgctatattcccttggctggcctactgcgcgattgagtttggctatattcgcccacgcgatagaaaactccgtcggcaggcagctgctaaacgccaccgtgagctcaagaagttgatccctaagaaacgtgaagagagtctccaggccatcgagctcatgaccgatcaagtgcaaaggcgccaagcgcgagaggaagcacaagacggtctggtcattcagaaggcagagtatggttatataccgccagtaaacaagaaacccaaaaatgggttcgcggagcctcgggtgattgatgtcacgatccctgtggctgcgctagttaaccggggtcaactggtgattcccggaaaaaccatcaaggtaagtcaggcgatagccttgaattggtcaatcttctttagagcggacactaatttgaatggatctagttccaaattttgggattccatgaccctgcgccattgctgcccaaacgattgaagatctggtatagattccaggggcgcgatcattttgtcgaggcaggtgataaagaggacatcgcatgccccatgcgtacgcactttatatccgaatgagtataattagactcatcaaaaggtcgaagaacccctaccatgtaatttataacatccagtcgttcattagcgacttattatttcaacctccattctgatgcttttactcccctttgtgtttttactaaatagttgctccgctgctcagctgctataatgcagggttgtcataatttgaagcctttctccctataattatcctaataatatcagtctcttgtacaaataacgtgagtcgtgacctcggaaattgttgctcaacgtcggaaagtcttggcataatttgatacggcactccataaagaccagccgtgcaattcgtcccgaaaagccaaatggagcgtcaccccgtgatatcttctcatcaaccacgagtgcacagctcttgagttgcttactcttgaaatgtcgacctctatcgctgcagggcttttcaagtccctccccaaaccgaaatattctggcgaggaggaggagttgccacagcatgcgcaacctcgtggcccgcgcgtggtgggcgccgaccagattgatgaaacacaggtggtcctacgagtgagttgtggatcattctatcgacataccagtacaataactaattgattctatctttcagaggactggacccccgccctacggaaaccgtgcaggatggcgacctcgcgcccccgaagatttcggggacggcggcgcgttccccgagattctagttgcacagtatcccctcgacatgggccgaaagggaaagtcgtccaagtcaaatgcgcttgctcttcaggtcgatgccgaaggtaaggtcaagtacgacgcgattgcccgccgcggacacgccgacaaccgcaccgtccatgcctcattcaaggatttgatcccgctccgacagcgggtggatatgggggagatttccctggaaaagccatctgaggaggagatccaggctcaaatggagaggactaaggctgcgcttacaactttggtcgaaggagcttcgtcggcgcagaagccgaagaacgtcaagggcggacaacgagctgagccgacttttgttcgatacaccccggccaaccagatgggcaacaccggccgccagaatgaccgcattatgaagattgtcgagaggcagctggatcctatggaaccgcccaagtttaagcacaagaagattccccgtggcccgccctccccgccgcctcccgttatgcactcgccgcctcggaagcttactgcggaggaccaagaagcatggaagattcctccgcctgtgtcaaactggaagaaccccaagggttacaccgtgcccttggacaagcgtttggctgcagatggtcgcgggctgcaggatgtctccatcaacgacaagttcgcgcagttcgcggaggctttgttcacggcagatcgacatgcgcgtgaagaggtgcagctccgagctcagatgcagcagaagttggcagagaaggagaaggcacagaaggaggagcatcttcggatgttagcacaaaaggctcgtgaggatcgcgctggtcctagtgctcgcgtgtcacgggctcgttcccgctctcgaagtgctagccgcagcgtatctgtatactcctccaggtctgctaccccaagcgaagatgacgaagccgcccgagaccgcgcagagcagcgccgtgagcgacgacgcgaagatgaacgacagctgcgccagtctcgcatgggcacggagcgccgcattcaaaccatggcccgagaacaaaaccgtgatatctccgaaaaggtcgcgcttggtctggccaagcctacacagagctctgagtccatgtgggattcgcgtttgttcaaccggaccagtggcatgcaatctggtttcaatgaagataacccttacgacaagccgctgttcgccgcgcaggacgccatcaacagcatttatcgtccacgtgcccaagctgatgccgatgacgaagatgcaggcgaaggcgagatgagcaagcttgagaagaccaagcgattcgaggtcttgggtcgcgccaaggaaggattccgtggcgctgctgaagccgaggtaagcttctatcccatatgcatttcttttcgtcgctaataagttattctataggagcgccaaggtcccgttcaattcgagaaggacactgccgatccatttggtattgacaatatgattgccgacgtgacttcgggtcagaagcgttatggaattcaggaagctgaagatgtcgaccgcaagtcaaaacgcccgagggtcgacgacgaatgaatccgctttgtttaatctttcttccatgtgtctctatgttctctccttgtctctatgcaggcatcggaaaaatatccccaatgcattgcgggcgtttctggcagtgtaatctttaccattatcttgttcacaaagggaaatcgaatcaagcgagtcacttgggctcgcttgcatgatatgggatatgccgtctcatttacagctacaataaaaatatgttggtctacatcttggaattaccagtagtatgttgtattgctagtgaatgtgtagattgagacagctttcgcacaggtacgatgaaagatgtgggtcgagggaatgtggttggataactagctacatccacataggcaaaggagactgagggttgtattccgtgggaccgtcaatggctatggagtccgtatactcagccatgactttctcagagagctcgcacgagaactggactttgatctggtataacctgcatagacctcaacaacttggtaatgttgatatccttgtaggtaaagtaccctgtcctccgcctgcgctgtctcatggggctacggagagatggcggtcgagagggatggggaaaggagagaagaagagaagaggagaaaggtgggaggagcccttttataccccaaacccacgtgtcttcccaaactttgtggccattgtgtttgcctggctgccccaggctcctcagtagatagcactatgtcttctaggtgtacacaatacagatacgtgtatgattcttgcctctgtttcgtcgcattgataacggaccaggcacaagatggctgcgactctttaaagctttgtaccctcaaggccatgtacctcatgtaccccaggtggaattgaattcacgcaagtaatattaacattatgctggtctaaagcagcccggaggcagcgtactatattgacacagcacccactcagttcttcacctccttcttattaggagatagcacactctccaaccacttgtaagccacaggcagactatcagggtatcccatgtgcactcggttctcgaacaacctagcttccttaggaccgccatgcttgagaggctccatgcagtcttcaatcgggacaacgccgtcatccacgccctagaaacatatcagctttgttttctttctcgagacggctgaacaggaatacatacgttgagcataagcaaccggcaattatcctggtcaagaataccagtctccacaagcgagaacttcttctgagcgttcttcacaaactcctcctcgttgtcatagccatacttctccgccatagcggaagtaagcctacatcatgattagtattccaccacataaaaccaaaacccagtcagaactcacacaaacggatactcatgatcatttgccttagccaaccactcagggctaaaaacaaagtgcgatccaggtccatgagcaacagccccggcaagacgcgcacggtgtgtacaagccgcgcggatagcatagaagccacccgcactaagcccccacgccgcgacacgcgacatgtcaaactccggccgccgatccatgtaatccagcacgctggaccagagcctatcgggcgactcagggtcagcgggatctgcaggcgagtccgccgtcccgggaatctcaacgataaccgtcgcccagccacggttgatgatctcgtgggagcgctggctgttgtcaggcctatacccgtcaagcccggtcatgagcagcacgacggggacgcgattggtggggctcgcttcctccggcacccggatgtacagcgggatcgaggcgccgtcgcggcccgcgcggtgcgtgtgtgaaatcacttcctccgtgatgatgggtttccatagtgaggcggctttcaggtacacttgcttctgacggtcgaaggcggcgcgcttgacagatgtctcggggcgtgttgatgggcttacgtaggggaagcgcgagatgcggaggatgactgctgcgcggcggtacaggtctgcggcgcggtcgagatggccgttgttgagggctgtgtcggcttcattctcgagggctgttgctgttgggaggaaggcttcggtataggcgtctgtgtttgcgtcgttgatgttatcctgttgttgttagtcgtgggtttgggttgtattcaaatgtttgacgatgctcacagcgatcagcttttggaaaataggctcgaagtcttccacggatccatcgtggaatgggtagatggatttagtggcctggtcaattatccgtgttagttccctgtgtgttttctgattgttgggaagagacatacgcagaatttccactttgactcccataggaccttgatcgatccctgatgagggtagacagtgtcgaacttgtctccgaggatccaattcaccattttgagcgggatatagacgaggtagattgatgggtttcgtactgcttatggcttttcgttgatgaactgcaaatttgaggcatcttgagcttttttcattgacttgccaccaactgtattcgccggtagcagtcattaccaagcaagccaaggcagaatgatgtctatcgagatgcaaacagtaggtgtatttgccgcaagccgtagatgagaccggatcggcagagatctgatgaggttgcttcgaagacttccggatgcggggaggtgacagccaagatgacgagggtaaggaatgtagatcagatcgtactctcagatgtctcattactcaaaatcccgctgtcaatttctcttcgcggcttttcatggcatttctgtcggcttcatcattatctagccttaggtaaagtgaaatgaacttttgtactcaaatggtagaatagtttcattctgattctatggaaaacaacatagaaacatatatctaaacaagagcaacgtatgattcagatggtaattggccctgatcctatacatggcctcaaatacaaaacatatatccgacatctccaattcaatatggcaaccccacgagacatcgattagatgttggctccaccgttacaaggcaaaatttgacctgcaaataattagcaagattcccaggggtgaatttaacattccagtactaaccgttgatccattctccagcaggactggccaagaatgccacaatgcggccaatatccgcaggcacaccacagcgtccaaggggactaccattagcaagcgccgtctcaatatcctcgatagacgagttctggtcacagccaggcgcatagcgccacgcgttggtcaaccacatatcactcttgacaccagcaggagcaatcgcgttaacagtagccctcttcttgccaaagtcagcagcaaagcagcgagtaaagccctccacagcgctcttgctgcccgcatacagcgagtggccgggcacacccaggcccgcggcaatagacgacatcagcacgacacgtccgccgggctggatatagtcgtaggcattcttcgcgacgaagaactgcgcccgagtgttgaggtcgaacactgcgttgaagtcctccagtgtagtctcggacaacggcacgaacttctccgttccggcgttcgacacaacaatgtccagctgtccgaagtgggacactacctggcggaagaggttggcgatagagtcgacgtttgtcaggtcggcttggaatgcggcgccgtggacaccttgcgcttggatatcttgtaccactgcgtcggcggtctttgagctgctggcgtagttgatcgctacgcttgctcccttcttggctagctctagcgcgatgccggctccgatgcctcgaccaccgccggtcactaaggcgactttgccggcgagctcgggctgggcagcgttggggtttgcaacgaccattttggcggttattttgatgttggagggtgtggaggattgtagatgactgggtgtggaatcgtgttgagagagggaaccctaatctaatattgaacctgttagtaacaccaggatcttggctggagtcagctggatggcttggttccatcattcatacctattgcagagctgggctttgtttccgaatttgtcggtgacctattacagtgccagtcattagggcccacagccaacatcaggtcctaaaacagagtagctgtttgcgaacaaggaccttgtaccgcatgcggaagtccacgaggggctgtctccaccatctgtcacattagaatccctcggttgcattgttgtgtttccgtgcatgggaaatatgctggccagatccggggaatgttggcatcaggggaatttgtggcaagtgaataatcacacggcgcgcctcgcagctataaccacatctcgaactatctgcagaaatcaaagattgccgaacaaccatgtctcctgccgtaaagaacatcaccgctgagcccaacttggacatcagcttccagggtatgtttcaatccaccctcattcacctgcttgtgctaacagcaacagactacctcatcctctcaaagctcgtcttcgactgggcggacagctacgatgccaaggtacacttccaatcgcattaaaagtgaattcaacattaatcctgacactatcccaggactgggaccgcctgcgcagcattattgctccaactctgacggtggactacaccaagatcggtctgagaagatgggacaacatgtccgctgacgaatacatggccatgatcacccatcccggcttcctcggtgacaaaaccatcaagacccagcatctgcttggtcagacatggtgggagaagatctccgacaccgaggttattggtcaccaccagcttcgcgcggcgcaccaggtctacgaaaccgaagagttggagactgtcaagcttcgtggtcactctcatgctacgaatgagcactactatctcaagatcgatggtatctggaaatttgccgggttgaagccgaatgtgcgctttgatgagttacgctttgacgaggttttcaagggccttgactagatgtcaatgggcttttgcgaagggaaactggtacaactctatatagtataagaatttattttacttggtttccattttctgtgaaattgttgaacttatggtaactagagaaatcgcgagacttctctatgcctgaaaaacaaggcctctatttgaggattctgggtttccccactgcaatatgctatatttagccacaaggtacgacaacatcatctctccaaatctcagtccgaaatagacaaatcacagtgatcatagccatcatcgctcactgatagatacaccttcttctctgccagtctagccttctcttctgtttcaatatacccccgcacttctttgagggcacaattcaccagtgaagtcaaatcttcatcattcggatgttgccgacgaatctcttcgaaaacttcgataccgtcaggagggttgtaatcttgaggtccacgctgattaaaggcgaggacttgcaccgcattaaccgcgattgcagtggctttgagtatcttcgctctgtcattttcggtatagacgttggaagggccgaagctcatcaagagcttagcaattggatatgatgtggtcaatagcatccaaatagatatattctgatcgacagattctgtcaacttgcgtagatcatggagcaaatgcgttttgagaatatcggcttcagtggcaagggagaccttgttgagtggcatcgtatttctcgcccggtcaatcaagtcaaggacaaattggccagcaggcatattcgccaatgaagcgatattctccattccatacttagcatccgtactaaatgggctttgtgtgtggtctgtttctgcagatggctttgtgtttggttctcccgcgacgttggtcggttcattcattgctgtcgacgaggaagcgtcaccacggccatactgatcgggaaacctggtattggagctcacgcatgcttgtggagattgggttggcgattcgacacttctttcagataatttaatccgaaagtccgcgcaatgagccctacattggtaatatgacggtctttgaggataatcaggcttgaactcgtagcacattcttcagggacatactcacgtaatacccatggtgccccgagaaattcccgatcgttctcagcaaactcaccccagctggtcggtacaaagagccgggttaatctaggatacctttgagttacttggacgcaaaacgggacattgagtcctaggttgtcgtctttggtttgcggtctctttcctgattttgcccagtagatgaagattccgagtcggtaatctccatcttcgaaatccctaggtctgacattatcgcaacagaatgcatgggaagccattgttttgggtggaggagatgagagtggacccgacgagctggagagatgtgcagatcgatactggcagtttaggtaccgttgatctgttgagttgatcataatgtttcattccttgctgtatacttttagaagacccaatacacaagtttggtttaggggagaaggatccagggtacacttaaccttctgtatatcaatctctagtcactgtgtagacttcgggagtcaaaatcagcaatataattcagatgtgtcctcgcacgtgtagaggtaaaacaggcaagagcccaccttgggggtgccttcctgatcaggtgccttcccatttggtcaaaaatcgtcaccaacccaattccctcatttaccttaagccattggggaggtataaataccccctccccccccccattttctctcttcttctttctttcttcttcaacactccgggtccacattgcaaatcgcgggtcgcgtgacatgggttctgtctcccgttgatcttgatggcctcaacatccagtcatcaacatccatcatgaccttgcatcgtccttcatggttaccgtccttcatggtcactgtccttcatggtctcaacattcacagtcatcaacatccatcatgaccttgcattatctatcatgatcatcgtccacagtcatcaacatccatcatgaccttgcatcgtccttcatggttaccgtccttcatggtcactgtccttcatggtctcaacattcacagtcatcaacatccatcatgaccttgcattatctatcatgatcatcgtccacagtcatcaacatccatcatgaccttgcatcgtccttcatggttaccgtccttcatggtcactgtccttcatggtctcaacattcacagtcatcaacatccatcatgaccttgcattatctatcatgatcatcgtccacagtcatcaacatccatcatgaccttgcatcgtccttcatggttaccgtccttcatggtcactgtccttcatggtctcaacattcacagtcatcaacatccatcatgaccttgcattatctatcatgatcatcgtccacagtcatcaacatccatcatgaccttgcatcgtccttcatggttaccgtccttcatggtcactgtccttcatggtctcaacattcacagtcatcaacatccatcatgaccttgcattatctatcatgatcatcgtccacagtcatcaacatccatcatgaccttgcatcgtccttcatggttaccgtccttcatggtcactgtccttcatggtctcaacattcacagtcatcaacatccatcatgaccttgcattatctatcatggtagaaaaaaaatgggtcacctcgacaagcaagcatcaacattcataccatctcaaccacttcgacaaccatcttgacctttgactaccatcttaaccactttgacaacaactttgacaaccatccactttgactaccatcttgaccactttgacaacaaccctgacaaccatccactttgacaataaccttgacctttgactaccattttgaccactttgacaacaactttgacaaccatccactttgacaaccatccactttgacaaccatccactttnnnnnnnnnnnnnnnnnnnnnnnnnnnnnnnnnnnnnnnnnnnnnnnnnnnnnnnnnnnnnnnnnnnnnnnnnnnnnnnnnnnnnnnnnnnnnnnnnnnnnnnnnnnnnnnnnnnnnnnnnnnnnnnnnnnnnnnnnnnnnnnnnnnnnnnnnnnnnnnnnnnnnnnnnnnnnnnnnnnnnnnnnnnnnnnnnnnnnnnnnnnnnnnnnnnnnnnnnnnnnnnnnnnnnnnnnnnnnnnnnnnnnnnnnnnnnnnnnnnnnnnnnnnnnnnnnnnnnnnnnnnnnnnnnnnnnnnnnnnnnnnnnnnnnnnnnnnnnnnnnnnnnnnnnnnnnnnnnnnnnnnnnnnnnnnnnnnnnnnnnnnnnnnnnnnnnnnnnnnnnnnnnnnnnnnnnnnnnnnnnnnnnnnnnnnnnnnnnnnnnnnnnnnnnnnnnnnnnnnnnnnnnnnnnnnnnnnnnnnnnnnnnnagccaccatccaccatgggcctctcctacaagaaccgtgaccatcatttcgtcatattacagagacacaaaggtttccacggctttccaatcaactcttctctcttttttgtcagcatcaagtcccacggccaacctgcaaagaaggcctgccttgaggaacttcaacttctcggtcaaaccaatatccactacagaccaacccatacaagccagtaactcgtgaaagcttccggatcaagtagtatccactgactaagtcactttcaccaacaaacacgggttgacatccacaaatcagaggttttttatgtctcatatcatcgtccaaagtggttctgtctgtacgaaccaacgtttttatgtcattggaaattagttagaagaagaatcaatttttgctatttcattttattctttctgtagattaatattcactttgtcctaaaccaaatacaaaaggcaagataaaaaggctaagcctctagggatgttgatacaagggtttgtctattgtcttctatgcctatggggctacgaggcctattattttcattttctacaggaacgatactctgtgtgaccatattttgaatattcattccatgacaagtttatccttctctgtctccaacagataacacagattcccatatagcaaaaacatcaactgagaccagacattcaataatcacaacctccacaatctccacaatcttagtcaaacaacaagtaatcgtacccttcatcgcagtcatagttgccatagtcataagaagacagcccagaataataacaaccatggtcctcaatatgcaagtagctctgactcccactgtcttcatcatgggaagtatttcgagtctcaagtcgaagcgaagatgacacaggctggtctttgtcgctgttttggttgatatcttcagtcccatcatcaggagccaccccaggatcttggtcttggtcttctccatcacaatcacaatcagaatccatagacccagtctcaacaataattgaagacggcacatgcttgtcggaaccctcagatccccaactatatcctaaatcaaatccccactcagagtcgtatccatgatccgagctagcttgttgttcgaaaccagattccagcacaggctttggtcttgatgccgaccccggcctcgttccagatccagatgcagatccaggcattttctgcttggctgcattctcaaggtgcttgagcggtttcgctacactatctctccaacgacgcgagctccccgtgctcggttcgtatatattaagatcatagactcgacgatgctcgtggcatcggaggatcttgcgtctgtttcataattaatataaggatatgatatgataaaggggacgctaatggttcaaggattagtcaactcactcgtgaatcttttcgaaattcgcatctgcaatgtcgtatgtggatacttcttcgaaattcccgtctgtatcgcttgggacgaagtactggatggactctatcggtcctcttttggcacgttgtatgagctgcatgcagacgcttgattcggagggatcgatggatcctattgaagtttcgggtgtgctcagggcccattttgtgaattctgtgaaggtttgttcgtgctctgggtttgggagcttttttggttggatggcgctgcagcagaatagatggtttgacattttgacggtttggtttgaatgagtttttatatagatgatggttggtaggagagaggatttatttcgtgggggactctgactataggctgtgtgaagtcgtcaggatgtgctaattccctagtattgctagattaggaaacggagctgttattcccatgtctagacttgcgggtattatcgggatggaaagtactatgccactttcatattttagttttggatatccatggtagaaagtaggaagttggagaggcatgtgaaggtcattcgtataccgaccaaatggctggcattagattaattagtagaaaagaaaatctgatatacaagcattaataacctctaaaaagacgcaatatcatatcacaggtgctggcatcactcccaatccttgatctcagccaggatatcatcatcactgaaaagagttagttgatgagcacatttcggcctttagagtgtactcacttagagtctttgatgggagagctgtgaccgttattaataacatagccgctataggtattctggtttggccacgggcccttggtcgactcctcgtggatagtgatgtggtggtcgtgcggtttgtcggggtgctcgacgtagacatcagtgtgagggactttccagtaaccatctgtgttggcactgggagatggcttcggcaccgatgcttgggacgatccctgaggttgattcgcctcagcgggagcatttgtgcccttggtggcagtatacagagcgccgtgattggtggtgggaggtgtggtgtcaagcccagtcagatcaagaccatttttaccagcagcatttccgctgacgccttgagggtaggcagcgcaggtgtcgtaatggctctgcgggggagcgtgcaagctgtgctggaaggtctcgggggcctcgatgatagtggccatgagaccagtctcgacgtgccactcgacgtggcagtggagcatccagacacctgggttatcggcgcggaagcggatgacggtgtggccgttgttctggaccatgatggtgtcgcgtctgatcggggtgttggagacgttgctcgatagacccgtgtagaagccgccatcaactggggtacgctgcagaacctggaattggtgaccgtgcaagtgccatgggtgcaggttgttgtggtggttgttgatgatgatttcgacgacctcgttgtacttcacgacgaaggggtttacttggccgtatacatcgggattggaggaaaactcgggaccgacggtgttggcagtgtagagcgatggcaccttcggggcgatgtacgtcttgccgttgacagtgaagcgcggaacaccgtctaccagaccggcggcggtatccaaaatgatctggtggtccacgggctgcaggatgggctcatggtcggcaggtaccaataggacatcatccacaaagtccgttgcggcgtcaatgttattgaagacaggaggcggaggtaggggcttggcatcgtcgtacaccaaccaggcggtagcattggggttgtagttctccgggatggtacgattttcgaagatgaacatcatgttgacatccatggtatcccaaatagcaaagttctgactggcatcaggtttggttttaatcaagacactcattcgctgaccagtcgcaacgcgcaggaacttgtctccagccgggtagggctcggtatagacgccgtcgacctccacgacagtcatctcatggccatcgaacacccagaagtggccgggccagtttccaacgcagatgatgtgaaccagatacgtcttgttgggcagaaccttgatcttggtgttggttgagtcgttgatcaatgccgcgtcagggaggggctcttggccatgggaggccgcagtgatcgtaccgagcagctccggcatctccttgtggtaccagtcgctcagagtgagtgtgaattcatcgtcatagtggaaaggagggctagggtcgtggacaatcagagcaccacggaatccatcggggtactggcccgcgttgtgtgagtggtaccagtatgttccagtttggttgacctgtcctgcagttagcatatgttcatcttttccaccgggattacccacatcaaagtgatattgcatgtgtgcgccgggggcaattgggcactgagtgactccaacggcgccatccataactccactgccatgctggcgcatgccgtgccagtggatagccgtggactcgtttccgagacggttgtagacatcgacgatcagttggtcacccaagttcacatcgatctgcgggcagggccattggccattgataccaatgaccgggcgctcaaacccatccggggcagcattcacccaagtaatgtcccatttcaggtaaacgtccttggcggcggctagaccagcccaggtggccagcgcaaacaaactaaacttggccattatggcagtattgaacgagcgaaagacgattggcctgattcaggaggatcgtaaaacccgccaaacgagtgcagtcgaggccgaatcaagaaagcaaaaacgaatgtcgaagaacgcggttgtcgaatgggcgcaagtcggccgctgtgctggatgtcgaccggaagagactggaaatggggcctctttaatcatggcgatagaataacaaagtggtcctgtcgatctgcaggggcctgagtatgctgctgaaatcagatctcatttcgacgttcgcgggggtgtcatgtcattggccgtgccttcattcacgacttgaaggctgggataataaacacgtagtagagcagtatcaggctggaccctgagcttccatttttttcctgttgaagaatgcccttggggggttgggagggtggaatgtagatagttcaccgaaccggaagacggtttctaaccgccacgcaaggggggcatactcgagtcgcactcgtactcgactcaaggcttcgtttagagtaagcatggcacgaaccggaagttctaataatgtatagaacttgcacagcatggattgacacctttgtgacttgacaggtttaatattgtggagtatcatgatgaagaagaatagtcgccgcaaacggattatctatctagttgtagtctcttagtagtctcttatatgttttctctgtagaaatcttctccttcttcacctgtaagctctttctctaaggaaactgcggcaaagggcggaatatgcttgatacggcctttctatgtacaacctttgacgaatcgacgatataagcattagcgagtcatataaaccccgagaataaagataactgggggtttcttattaaattgtaatatacctcacatatagactttcgctggttgatttaagttgaaaataaccttaagtccaacattatcctcagcacaacttaagcaaatcgaatataaagcatccaagtagacgtcaagcaaaaggcgtatgaactcctgacgcgataaggcggaggttcccaatcgggctgtgtgacgttgcagtgaaatctcttctgttagagcggcaaagaaaaaaaaaggtctatggcttcagcgcatttgctatcgtgtatccccggaaaagcgggagattgactggagatgttaccctagacaaatcagatccctgtctggagtcctgcatcccatacatgatcccagaagatctacatcgtattgtctgataggagaacagccgggaaacatcggcgtagaaggccaaggcccacaaaaaacgcccaggcacgagagcgtctccctaattgagaacagtctgataagctgtggagtaaaacgaagagatttagtgttagtcaagcgctggcgataacgtgggaaaaagtgggagggggagaagttgaagaggaggaggggttgccactatcttcacttcttttttcttcagagtctgagtcaaagagaccgtcggccgatctacagtcccaaatcttattctcaatcttgactgccactgacgacatatctggatggcgcttgctcaccccagatagcatcatcgagcctcaatggcgtaatagctggttctttattcaaacatctcttgcttcacaataccctgacctcgtgatatggatcaatcaatcaccctcatcgatgcacaagtgcacttcctagtgagtcattcatattcggcatacaacatctactaacctaatgctaggaggaatgtgtggtgctggtgcacatcccattggagctgtatccttacttcttaaagtctgttctaggactcattttcgatgaagtccctccactggaagacgagacagaccatgcatttgattatgaaaatgcttctgaggatggctcgtacaaaccacctgcattcatgaacgtgtccatcacgccagtggaagtctccgtcatgtgtccaagacgcctgctcgacaaatactttgtccccgtcatggaccaactcgaccagttggatgggtcgctccggtcctgtctgatcgtgagcgagaatgactatatccccatgcaagtgctcggcgaaggcctcgaggccggaaaacgagtcttggaactgaccagtccacttgccctggccggcatgtatgtgaagcctaatatatccatcccctatataaaaaacacccatactaacctccccagatccatcttcttcatctcaacctacttctccgactacatcgtagtcccccagcaaagcaaagcaagcgtgatgtccgctttagagaaaagaggcttccaattcaacgacgcctccgcagctttcatcaccaacccgctcagtcctaccatcgaaagaagactcagcgacctcatcccaccgggcacacccccaccctcaactctaggcgagctccaaacccgcaccttcaacaatctccgcaaacaccaaatcaccccctccgtagacaactccctgcgcctagtccagtgcgccgcccaccacgaataccacagccaagaatcctccatgtccatcctgcgcgacgccctcaccactgtcctcctcgtcgacgaaccccgcttcctctccctaaccctcgcagccctcgaccccgccgcctccctcctcctcgaaaagcgcctcctcccccgcttcgcccgccactccacctccgaaactggattccgcgactacgaagacggctccggcctcctcctcgggtccaaggaagaccacctcatccccatcaccctagacctccgcgacctgcccctcgaagcctcaggtatcgtctgcggcgtggcgggtcgtctcgcagacgcagctaccgtgaatccaagcgccgtcggcggcctcggctccgcgaggacgttcgattcggtcggtactcggctcgcgaacgtctcgctcgataaatcatcccatgcgctccagcccttgccatcctcgacgcaccatctccagcctgatgtggatgtcgccgatgcggtcgagattagtttcttgagtaccgcgcgcgctggtaccattattgttggcgaggatgagcttaggagggcgattgatgcgctcgaggaggagaagatgcagtcgcctaggcttgatggtctttgcttggagtctgagactccgccggatagtccgcagcagggttgagattgcgctttgtggatggcagaggatatgacttatgtgttcatgtgttgatgtggtgtatgggtagtaaaagttcgcttgttttaatatttgtatgaatagctctacttggtcatggattgcttgagtttattggtctgatgtttacttacgtcggtttgagatgaaattgttgtaaaatggtagtcatgtctgacgatatatatctccagagtagcaccatcatatgttcaacccaacagcacagcttaagataaaacgatctcaaattacagaaatagcagaaattgagattattatcttattatttcatatctcattattaatataatagcgctggacagacatacaggtcaaatttctccaacatctctctactatcctcgctgcaggcgaagacttggaccaacgtagtaaatgtctggtggtctgcagatgtacttctaccgatcttcgctctggccttgctcaaaatagccgcatcgcctggattgcaattgagaggtgctcatcaccaagcccattgaagcctcaaattgaacgaaaatggtagagggtagtaaggccgacacagacctgctagtccatatcggattccaccctatcgtcgtttcggcagtggcataatgcggcgcgtacgcggttcgtgatattaacgtcaacatgaggatgactccgagacctgtctgagacaagttcatccgtagaccctgacagtacctaaaccaacagtcagcaagtatcccaacccgccaaacaacacaatccttatcctcaccatcagaacatccagcagcccaatcccctacaccctcattccacgccacacaactaacagcctttaccttctccccaaccggcacagcagcaataacctcccccttaacaacatcccaagcaaacgccgccgcccccgcaaccccctcctcactcccactcagcacgaccgcatcccccatcgcgaaaaccgagcgcacgcgcagttccgcattccgatacgaataccgcggcttcccaatcccaccgaccaccgccttctcgcccccaaacgcattgagcaacttcccatccatgcggtccagcaagcggatatacccgtccagcgtcgacgccagcagcgcgttcccgtcgctcgagcagcgcacgcttgtcaccgggtgcgcgaggacgtcgacggttgtctttcccgtgcggacgtcgtagatccgtgcgtgtccgtcgtagctgccgcttgctattgagtagctcggcatgtgtacgtgtagtgtggagaccgtgtcgctggcttccgtgagcgtttggatgggtttgtagcttgtggaccgggtatcccagaggttgattgttgtgtctgcgctacctggagggagggaggacgttaggttaggatgctaggtgggaagggaagggaagagtgtggggataaggggactcttaccggttactacgacggagtccccatcgccgccaaattgcacggcttcgactcggctgttgtggccgctccagcgtttcgtcgtgatgccttgctctacatcccagaggaagacttggcgatcgcctcctacgctggcgaagcgcgcgttgtcggctgtgacggcgatgtcgaggacggagtagccatgtgcttcgtatttttggattggagtcgtcgtctcgactacggtcgggctattggtattgtttggaacggcgcgcgaaaggtgtactgctcggtctgaggagcctgtgaggacatatgtgccgccggagtttgagaatgttaccgcgttgacggggcctagatgaatgtcagtgtttgtgctttggaggtgatttggttgtaataacccctagacaataagactttaccattgtgtgttttaagagtgtggatatgcctagttgggaatattgtccggggcatggccgttgagttggtggagagaaggaattggagttcaaagaatgcgggagttcagagcttcaactttcaagtctacttaaagagtcctatcggaggggaaaaaactactactttacttcgaacgagctcacaagtattaattctgtcatacggaatacagaagaagttattatcaaagttgtagacacaccatcgctagctaccagcggtaaatggatataacaaacgaaacgaaccaagccaaagaaaggtgcttccaagcgcgaacggcaagacatagggtactcaaaagagaagaaaaaacaagagcatggttcgactactccccttttgaacgatccgggtggaatcccggtaaaattgcaacatcttaacgacgtccgtggctgcgggtgccggaaccctgcaaaccctcgatctcctgctccagggatttgatactggaataagtcagcaatgaattccaccaaacaacgctccggaacatacgctgcatgagtagcctccagatccttgttgaggcggtcgcgctctgagatgagcttctgctcccactggcggaaacgctgctcctcgaccttgacctgctcggtgaagcgcttgcgcagagtctcctcttcctccttgaacttggggttgtcgagcttgcgtggccgggcctcgccaaacttgcgggtctccatctgctgggcgcggtatgcctcgtagtgcgattcttccgttgtgtgaataagatcgagcatgtgggtgcggatcaagatcgagcggagcttcttgaaatcgcagtgctcctcattctccacctcggcaacaccccaagcgtactgacgacccttgacgacacgaccatcgttggccttgacatccttctcggaaccgatgacggcgaaaggcatggcagccatcaggctgcgggcatgggaagcggcgtgctcgtcgtcctcctccacgggcggggtgtaaatcttgatgccctgggcctcaatcacagcgcggatctaatcaaaggttagtccggattctccccctcgtgcactcgttccactcactctatccttgtagcgcaccagatccgcatggctcagggtatcggccttggcaacgacagggatcaggttgacgcgggagctcagacgtttcatcacctcgatatcgaggggcttcaaggtgtgtccagtggggcggatgaagtacaagcaggcgtgaacacgcatgtcaatcttgtcggttcggcggggctgctgctcctggagcatgtacgactcgtgctggtcatccaggaactcgataatgggttgccatgaatcacggttgttcacgtagtctccgaatccaggggtatcaatgacggtgaggcggactagaaaaggacacctcgtcagctatcgaaacgcggaagtcgtagccctccaacacgagtatctgggtcgcacctttgaagaacttctcctcaagctcagccttggtaatctcaatctccacggttcggtcgacctgcttctggtggcggcgcttgtgatcggcatagttcttaatggtggtggagaagagggtgttgatgaaggttgtctttcccaatcctgactctccggcaacctgatcgaagcttagcatcaacacgggcggatcatttccctccgacggtgggacacaccataatagtgaaggctgcaccccgcttcgcgacaatcttgtgactatacaagcttgattagaacctttcctcgtatccactgtaatcactctcaggtacacaccgctggttggggagctatatcaaagagggcaagttagcttcagcatatcacaagggagacgcgggcgttctgaatagcttacgttggcaatgccaatcggcgtggcggtctctgaggtcgacatggtgggttatagggggattaaaaacaattcggaatcaacacaaaggaagatgaagaagaaggccctggtgtagagtaagacccaaattgagaagagaaaataagtcgactcctgaggagaaaaaaagggagaaggaggaacgaatgtgaaatcggatctctctcgaactgcccgtcgctgcttccccctgaatctcctttcgttttctggagtatacctcaccttgcctatctgggtttagcttgacggactagtaccgattgggtccgggtccgggtcattgatgatccgcgggcccttatcacggtagctggttgaattatctctaattttttgatctgtgagatcgccgacagccaaaatgaagacagacttcaaggtaggtactacgcttggattcttgatcgcatgcaattgccagcaagcctggattattaagatttatactaataccctcaattttagttctccaaccttttggggacggtatatcgcaaaggaaatcttctctttactcccgatggcacatgcttgctttcgccagtaggcaatcgagtctcggtcttcgatctggtacagtatgtgtcgcccgacagtccttcattcggtgatttgaaaccagcccgctcacaattgcttctatagaaatacttcctataccttgcctttttcgcaccgtaccaacatcgaccgtctcgatcttacgcccaagggtaatcttctgttgaccgtggatgaaaatggtcgcgcaattttgaccaacttccaccggcgcatcgccattcaccacttttccttcaaaggacgagtgtccgcactcaagttctccccgtccggtcgacatttcgccgttggcgtgggcagacgcctgcagatctggcagacgccctccaccccgggtaccgaaaccaatggcgagattgaatttgccccgttcgttctacaccgggatcttgctgcccactttgacaacatcgaaagtgtcgaatggtccagcgattcgcgcttcttgctcactgccgccaaggatttgacggcgcgagtatggagcatggatccggaggaaggtttcgagccgactactttggcgggacacagacagggtgtagtggctgcctatttcaatgcgacacaagaagtggtaggtgcttactggaaattggactggaatacatactgattcttatagatctacactgtcagccaagatggcgcactcttccgctgggagtatgtttcaaaaaaagacgaggaaacgaatgaagacatttccgacgcccgatggaggatcgtcaaaaaagatttcttcatgcagaacgacgccaaggtcaactgtgctgcgttccatgcgccgaccaaccttctggtggtagggttctccaatggtttattcgggctctatgaccttccagagttcaacatgatccatcaattgaggtacatcagtctgtgacaccctccctttcacagtggctaatatatcccctctagtgtctcccagagcaatatcgatgttgtgacaattaacaaatcaggcgaatggctagcattcggatcgtctaagcacggtcaattgctggtgtgggaatggcagtccgagtcatatatcctcaaacaacaagggcaccttgattctatgaacgccctcgcatattcaccggacggtcagaggattgtcacggctgccgatgacggtaaaatcaaagtttgggatgtcaagtcaggcttctgtattgttacctttacagaacataccagtggagtgaccgcatgtcagtttgcgaagaagggaagtgtgttgttcacagcgtctttggacggctctatccgtgcatgggatcttattcgctaccgtaacttccgaaccttcacagcaccatcccgactgtcgttctcctcgttggccgtggaccctagtggagaggtgatctgtgctggttcaccagactccttcgacattcacgtatggtccgtgcagaccggtcaattacttgaccagctctccggccacgagggtccggtttccagtcttgcctttgctgccgatggtaaccaccttgtcagtggaagttgggaccatacagttcgcatttggagcatcttcgggcggtcacagaccagtgaacctctgcagctcatgtcagacattctcagtgtggctttccgcccagatgggcaacaagtcgccgcatctaccctagacggtcagctttcattctggtctgttgaagatgctgtacagcaaggaggagttgacggtcgccatgacgtctctggaggacgccgagtggccgaccgccgtactgctgccaatgccgcaggcactaaatccttcaaccgaatcacgtacagcgcagacggtagctgcattctggccggtggcaacagcaagtacatctgcttgtatgatgtcggaacggggtccttgatcaagaagttcaccgtttccgtcaacacctctatcgatggcacccaggagttcctaagcagtcgtgacatgaccgaagctggtccccgtgcgcttattgacgagactggcgaagcgtctgatcacgacgatcgtgttgataccactcttcctggcgcgagacgcggtgatgctggtgcgcgcaccacacgcccagaagtccgcgtgacgtctgtggatttcgcaccgactggacgagcattctgcgccgcctctagcgaaggactccttgtttacagtttggatactgacttcatctttgatccctatgatctggacatcacaatcacaccgtcaagcatccttgccacactagatgctgccaaggaagctgccatatccaatactgtggatgaggaaaataccttcctcaaagctcttatcatggccttccgattgaatgaacaaaagctactccgtgtcgtatatgaagcgatccctccgtcagatattccccatgtggttcgctccgtgccctccgtctatttacctcgccttctccgatttgtagcacatgccgccgaagaaactcctcatcttgagttcaacctcatgtggattgagtctttgttcagcagccatggtcgctatttcaaggataacacaggcacattcgcaaccgagcttcgtgccgtccagcgtgctgtcgatgacattcgcgagaatctaaaacggttgacggaaaagaacctttacgatctcaactacctgctctcgaagcctgttctggggaacaagaaaactagcagtgctttgttggccatggagaccgaggatgctgaggttcctgatgatcagatggtcgatgctgacgagggagaaggtgactgggttggctttgaatgatttctatggggttttcttcgtgtatgtctacttgcatctgagccaggcgttttgtatattggttgcaaagaccaaaaaaggaaatagacagaggtctttgcggccttgtgtgaataatatcctccaagttctgctctctgagacctcaaacggaccctttgtccatctgttcgccttgagcaaacgccgtcccgttttaaaataaaaagtcttaccttctaatactatccgaatgtgtcctgtgccaccctgtctttacccttcttactcttcttaccgccgaacaccttccttaatctctccgcttccaatattccggacaatccaagtctccggagaatcatttatctaagtacctttcctctttctgctgtcaagagcaagatctcatcgtcagccaacctcgatatggccggcctacccttctggcccctcattggggtgttggctgtagtgctctatctccttcgacgaccaccaccttccagtttgagacatatcccaacggtcaagtacaatgcctatctaccagatttcatcaatcgactcatgtactaccccaaagctgcctcgatgatcagtgaaggatatgaaaaggtacgcagcatactgcaaaccacgcgttcacctctattgacatttctgcaatttctagtacaaggatagtccatttcgcctgctcactggcgatggagaagtcatcgtcctgcccgtgaaataccaggatgaactgagacatcttcctccttcgagactcagttctctacatgcccaatatgaagtaccatgagcttattcgtaccacattacgttgagatgctgaagctaatataatattcacagaacgcgttgggccagtacaccaacatcatcatcgacacccttctaccttctatgaccgtgcggaaaaagttgacgcccagtcttggtaccaacatcatttagttctcttattttcagcctcgtgctagagacctaatatatcgaataggtcgcgttgttcccgggatcatcgacgagctgcgaacagcattcgaaactgctctcccaggatgcgaaggtgggaccgaccaaccatgcagatcaacactcggatactgacagagaggtactgaacacagatacctggattcaaattaacccaaacgagatgttcacccgactaatcgccctcgcgacatcccgcatgatggccggcgacgccctccgcgaaaacgaagaatggctcaacgtcgcaagcaactacgccgtgaacgtgggaatcaccattctcctgctccgccctgtccccaaatacctccgtcccatcgtagcgcgcttcctccccagtgtccgtaagatgaggaagcagttgcgcttcgcgaaagacctcttcattccgatgatccacgagcgcagactggcacaacaggctaaagaccccaattataccaagccggatgacttcttgcagtggatgatggatctgagcgaggaaaagaaggaggacctcaaaccggataccctggcgcatcacatgctgctcttggtcacactggctgttactcacaccagcacgatggccttgtgccactgtatcttcgatttggttaccagacctgaatacattgagccactgcgggaagaaatcacacggactctgcctgatggctggtatcggacgactcaggctgcgcttaaggagcagtcccgtctggacagcttcttgcgcgaatctcaacgcttcgctccgcctggtgaatgtgagtatcggatcttttcttatggctgcgccgtataaccagtcagggttagtgtgttagtatcatgctctaatcacctacgttgtctagtgaacttccaccgcatcgtcaaagaaccaatcacgctccatgatggcctcgttcttccagtagagacacacgtctgtttcgctgccggtccgattagcaaagacgctgccttcgtcaaagacccaatcaccttcgacggctttcgctggtgccattaccctcgggatcgctttgtcctgacccctgagctcggaaaactcgacgctatgctgaacggtgctggtgagatgcaggctgaaaagtccgcatcttccgcctatttcgtttcgatcactaacaccaacatgcatttcggcttcgggctccaggcatgtcccggtcggttcttcgcatcgaatactttgaaggcaatcctgagtcgcctcattcttgactatgaattcaaattcgttgaagacctgcaggggaagagacccagtaatcttgtggttggggagcatattcttccgagtatgactacggagatgctgttccggaaaagacctattgggctttgagtagaaggggagatgttacttttcagggctaccagaggtcgatgcccgatgccatacttattctaccaagatgttgcggttcttgctttacatctaaatatctcagactaggaaataagaatattgagtttgatttcagttccatcgtacagtcatctgcaatagatataagcactgccacgacatacatgtcgagacggggcgcagatatctaaagcgtccacatacatagagggttcgaatccaatcgtttcatcatatcttctctcgaatatcacgtcgatcattccctaggcagtgggctggggggcacctcctcgcccacgacctcctctgccacggaacccattaccacgaccgcggccacggccacgtcctcggtccaatccttgcggcggcggaacgcgagagtagttctgcggacggaagttggggttgttttggataataccctcgctgggatcgctgttgtccattgcgacatatccgcctcgcgcacctccccgaccggcacgggggccacggggaataccgccaccattgggacggaaaggaagagtggtctgttggccgttgttgagacccccgcgacctccacgtccagctccattgccttgtccattgccttgtccggcgacagctcctcggaaagagcctctcaggggcggaggggcagttgcgttcctcagttgtccctgtccgtgaggaccgatgggtgcgccgtatccggcaactgtcaaaggagtctgggtttgctgggtttgctggctagctgtggcacgggaactagtgatcagttgtcggttggagatgttgaggagggaagatgctaaaacagtttgaccacggaatggtgagcatcgaccacctagcgtagtgccgctcatgaacgacacatcaaagacaacatcaagcagaagtgctcgtggggttctggttaaaccgacaacagtgccacgagtagcgattggcaccttaccagaatcttgggcatacacaacccgatcaccaagctggaaggtttggtttccgaggcggtgctcgacatcggcaggccgaaggagtgcactacggggcacaccccgaaccttcttcggttgcatatctggctgggacgcattgagattatcggcatcctgctcaatcaacatcacaatatccgagtcaagttgctcagcatcgaggggcactctctcgaagttcttagcttcaatagatttgagccaatccttaatctctttcatcttaagggcggcgatttcctctggatagaaatcagtcggagaataacggtcgctttgagggttgcgctggattccagcgatgaattcggggaatttaatcatgtactgttgaagcagttccactgccttttggctaaattcccagccagattgtcctcgacgggagtatccaagaaccttctgttgctttgcctggaacttcaggttaagaccgaggttcgcacgttggccttcgatatcaactgtaaaggaagatgtgatcttggctaggaccaaaggattgaggcgaagactgcgcgcaacagcgtacgaaggcatgtaggggcagagttgctcagatgccctaacacgctctcgaccgaattctggctcccgacccttcacagccgcgaccaatccattcacctttccgtcttcgtgtcccccaacataaacaggtcttccatagttgaaatcacccaagaagaaggcacgagaaccctctgggaattcttcttggatagagagagcttcacgctcaataaaacgttgatcaggattgatcacatcatcaacaacaacctgtagagcataatccgtctcttggccgggaatatcagcgaattccttgattgtggctccatcgtctgtcttgctcatgcccttcagaagttgaatgtggaccagagattcgacatcgccaatgataattgctagacgcttgctgtaggtgccctcaatcttgttggccttcctcttccactgctcaatttgctgaggggtatgaggaatagataaagggtgttgttctccaggaggtagaacataatcaaataattcatccgaaacgcggaccacaagagcttcttgtaagaatggataacccacgtgaatacgcttcccaagcttcgtcttagccagttcaatgctcgaccggcttcccggatcaaggagtgtaataacctggctctcgttgcggctatcttgattgaacacgcaaacgccatggaaacctaattgaccatggtgcggaagtgtcttgatgctagggaagccagcaagcgctgccttgcctaagtggacgccgtccattaagccagcgtagggcaccaatccatccatgacggggaggtcaaagaggttctcaatacaacggcagctaggaagatccgggaatacgccaggcattgaggaggggtaaatgaagttcacttctggggaataggtgaatttgagacaaaccccaaagtcgttccttgctttttcatccgcggaaagtaggttttctttcgttttgagggcgtccaaaagccgtttttcgtcgatgaatggaatcttgacaacggcttcccattccatcttttttccgttcatatccagatcaaaatcacgggggtagaaatcgtagatgggggaatcagccgaggtcatcaggtcccaatacgcagtaggcacgatcttcttgctgcgatcgggcaagacacccataagctggtcgaacggccggaaaggctgtcccaatttgaagtccatgtctgcaccaagaccatcattcacatctgttcaaccgttagcaatcagaataatccaacaagaaaaaagggggattgggtactactaaccagaaatcataggggcatagtggtactggaagaaccaaggccaagaagcaatgccacggtaatagtagaacaagacccactgcaatccttgcacgtagttttgcgccaacttcttcatctcttctttgttatcgaggccccagccgaacttggtccgataataattatctttccactctaaaaacttggcatcatatttctcctgcgcggacttctgtgcttcctcgggagtcatctcttgaactttggccttctcgtacttccgaataatacgctgaacagccaccgatgcctcttcgtcctcttcgtcatcactgtcacactgggttggaggcaatgtgagtctcatgaatcgatcaccgttctcgttgtcgatggaggaccaaggcaaccggagctcatccgcaagctgttcgacgaaagcgcggtcacgagctggaagtgtaggagggaggtcaaggggttcacaggtcttatcagaccggttcagaacgtacttcttgaccgtcttaagtatctccttctgagcaggagtgagcgtaagctctttcttctgttgcgaggtcgaataatcaatgcttgggtctttcttcgatttgatccattgggcatcggagttttcagcctcaaagaatcggtattccacggcactaagcgcagtcacaagcatgcccaaccgttgcacgttaataacaccctgctcgttgatgtagccgcccatttttggcagcacctccttgtagagcttgaacataagggcaagggcaccctcgttgatatgtaagtttggcaggttgggcaagaaatcgttgccaacgaaaaaggccataagaatgaaatcatcaatgacacgctccatatcgaatgggaaatccagaacaccatcttgttctagctcttggaattctagttccaaatactcccgcaccacgctcagatgcaggaggtaaaagttttggtgttccaattctttgggcttcttggatacttggcgaccaaaggtcacttcctctcgaagaagacagaagtgagggtcatggctgaggagacccagcatgatcagatcggcatccagaccgtaaagacaatggcgaacgttggattcatagtcgggctgcgctttcgagcagcgaatgtattccataatcttgtgctcgccttctccgggaacctcatggccagaaagcacaatttccacaccttgccaatctgtgtcctccgagattttcttgttgatgaagtatttgagttgtttcgtcaatttctgcatgaactcggtacccggggtgatgcagttgctgtcaaaggcatcttcctttggcatctccaggccctgctggatagccttctccttcgcattctctgcatccagggccgtccggaatcgacgcgcacgttgttgattcatcttagcgcgaggcgcaacaccgtctaccgccatgtagaacagtttcttgggcttgattttgccaaatagatgttcaatgtaattgaagatggcaatgaacatttgatcctccgtcatgcgaaacgtcggggagtcgctgtcactatgtgtacagttgtgaataataccgttcatgtcgaggtataggctatcgaattcgggtatccggctctctgcgatcagcatcgagattgacggataccgctcactcagccaacggaagaatttcgggacacccatggtgaagattgggtccgattgaagcgaaggtcgccaataaagaaatcggcaggtgatgtatcgtaatagtttaaagatcgtatgaggggttcttggaaaggactgaagtagagttacttgcgacgaaaggtgaaatcatccaatgaacagatcttggatgaggtactgcgtcaacgaagtggtgtccaaagaagaatataaaaggacaaacgtaaacaagcaagagaaaaaatatataacgccggactgacgcttttcggttgtctatgatgcgatgcgagacgtagtccccgcggcgatgcgatgtgaacattgaagagtcaaccccaagctcattcaccgcctaccaatcaggtttagtgccattacgggtctctcagcactcattaacgcgcgaatgcgcgtagctttcctccgcctacctatctgcttcacacactctttctaagtggctgaagttctgttatcttgtgatcttattatattgcttgatcctataccaccccaaagccatggatccctatgaagacgatgctggtgagcatccatgaccttgcgcactactcaaaaatctcattctaatgaagacctaggtgctggtgacgagcacgagaaagaccaggatcaggaccaggaccatgaacacaatgatgagaaggcgatcaatgaaggtagctttgctcaatctctccagttctgccaaccacggtatctaattatattcattggtcacagagtacaaaacatggaaaaagaatgcgcccttcctctatgatatgatcctgagcacagcattagaatggccaactcttacaacccagtggcttccagataagcaagagtatgccccgaaaccctactagtcccactggtccaatcatcaacctaaccacggctatcttcagagtcccggacaagccctactcaacccaccgtctcatcattggcacacataccactggtgaagcgcagaattaccttcagatcgctcaagtgcaactcccaaatcctaatgcgccaaaccccgaagactatgatgaagaaaagggagagattggaggttatggtgggggctcaaagaaggcacagatggagatcaagttcaatattgtgcaaaagatcgatcacaagggcgaggtcaacaaggcccggtatcagccacagaacccaaacatcattgcgacaatgtgcacggatggtcgggtgatgatctgggatcgttctaagcaccctagcttgccaactggcacagtgaaccctcaaatggagctcctaggccatgaagctgaaggcttcgggcttagctggaaccctcatgtagccggtcacctcgcgacaggcagtgaggataagactgttcgactttggtagggcacagcatgaaaacccaagaatttggtgtgactcgcagctaatgaaggtcaccacagggatattactacatacaccaagggcaacaaggcagttcggcccagccggactttcacacaccactcctcgatcgtcaacgacgttcaataccatcctctccactcctctctcatcggaaccgtctccgatgatatcacgcttcaaatcctcgatacccgccaagaagactccactcgcgcggctgcttccgcggaaggccagcaccgcgatgccatcaactccatttccttcaacccggcttccgagacgattctggccacgggttccgccgacaagactatcggtatttgggatctccgtaacctgaaatcaaagctccactcgcttgaaggccacaccgattcggtgcaatctatctcgtggcatccatttgaggagtcggtcctggcaagttccagttatgaccgcaagattatgttctgggacctcagccgggcaggtgaggagcaaacacccgaggatgcccaagatgggccaccagagctgtaagtgaccacgatttgttttcttcatgcaatggtttgtattgttcgctaaccttgctccttagtttgtttatgcacggtggacacacgaatcgaatttcagacttcagctggaacctaagtgacccttgggttctctgttccgctgccgaggacaatctactacaggtatggaaggtagcagatgcaattgtgggcaaagacctggaggatgtcccaacagaagaaattgaggcgtagatattatttctaccggacttgcagttgtctcatcattttccatatggctgcttctttgatatagttgaatcaagaccatagtgagtaatcttaaaaaacactatttcctttgaaatctatatatattcttgtgcctataagggcatattgttacccatggccaccaccaaccatgatagtctaactaagttacatggcatttataattcttgtagactcgaggaccgcttagtgatatcagcattcgtttccaacattagtcattaattactaataacgaaggacctttagaaccgccgaaaatcgatcgctaaaacatccaagcagtcttccgtcgaacacattgattaacacacgtctgatcaagctccttatccttcgaacgagtcatatatatacgtcggtgtacccctgagctaacttaggtttcgtcagtccatatgactcgcttctaatcgttaaccttctagtaagcatgcttgagcgcaaaggctattcgtttagtacggtctctttccgataccacaggcttttgtgtagtaatgtaccggcggataccatggtatttcaggaagcggcgtagtgttcgtggacaaggcagattcgttacagtggttacctctgctattgtcatcctgcgagctgtggtgtcttgtcggataaaggccgtgattttgttcaataactgctggcctagctagcctagtcataccagtacggcggggccttccatttagataaataacacgccagaccgtatggtatctgacattaacctgcctcataagctgctggtatgttaaataccatactgtctggagtattattcatctaaatggaagacctgtggcctgtactgctttggtcaagctcgtttcggttctgcccgttactgtggtgacattcaaccttatatataccgagctccagaagttttgctacgtacaacttggatgaaaaggttgatatttggaatctcgcggttctcataagtaggccatcaactccatttctggacaatgcaactaactcatccaaacatggaccattttccaacataagcaactattttatgccagagattcaaacaagaaacaggcaaacgcttaccatctcgctgagatgattgcgattcttggaccgccacctaaagaaatgttagaacaacgactatgctacagaattctttgatccagagggcacgctatccctaacatctacacgtcctgtcacaaatcaagcaattcaaggtcattggaagggagcggcacccattccatcaaccaccttagagcagcgggaggaaattttgcaaggtgaagagcaacaactctttcctgccttcatgcgcaaaatgctctagtggcggccagaggaaagaaattttgctagagaattattagcggaccagtggctactttcgccataattgaatagggccatttccggttgacagtcttgaatttataacataaatacatagatagtaggaatataataagggtattgatatgtaggaaggcggtattgaaaatccaggggtgcacggacccagtagctggggccggccccagaaaatccagtttatgcataaattacgtcttggcggtcataaacatataaaatctgcagaattatgcacacaattagcgtgtttgcatggtttgtaacccaatttggggtcagattgagttgggtccgggtacgagcaacaattccctaaaaaaatagttctctctactaacgaagcatctgggatataagctagactatgctcgaaacaatacaccgttatatgatatctcttaatagattatgaacctgaatcaactgacttagctcgagagtaaaaagtagaaaagggaagagagagaagcatagcagaaaaaccagcttggttattgattgaaagccggaaaaaactagttaaagggcaggtttgccggcctagattcgagagacatctcttaataactaatatgccgttgcttaacggctattgtattgtgcgtgccatcttcatgggggtgggatttatacaacacattttcagcttcatccataaaagcaattgaaatcacatcctctgtatctgccgggtcggtttgtgacttacgcgacctaatcccactatgttcgactattagcttgacagcgaaatggaattgaaggtttctaaaacgaaacgaactagatttgatatcctttgactctctcatcctggttccatatctgtcaacactagaaaatagtagaaagtggcttctcactcacctccttttctttggttttaactaatttcctcaaagatgatacccagggtctaggaacatgttcatgtgtgacttttctaccagcgtggcaagccgtgcaactgttgcagtgaacattgttgcaaaagttatgcaaagatagataaataaggtggaagacaattgtctaagatgaatgaaagtaacagacctaatgatgtccttaaccgaacgtgggaaatggtgtgtttttatacacggatcgattcttataatcaagctgtatgtctccggcatctgcaccaggatcctggtccttgcgaggggcagtatatttgatgttaattgatattagtatagaagctatcaatttcaacttcctaaataggaagcattctctacgagcgggttcgatgtggttgcgaaggtccgcctagtacaagaagcgaaaagtgtaataataagccccttgtcgtagtccgtgcggccgatacgagcgctggtcgataccttgtctgtggcttttacgagactaatcgataaagcacaatcgccaaaagggaatgagatgattgggcacgaatgggaacggaaagttggattccctaggatctgtcatcataataccaaatttgcatgctgcattgcacgtggcgtgcctgattccaaacccccgtctgattccaactacccatccaaccttccacctgagtcattttctctctgagatgagtaccccagacatcccgatcaggttatatctatacggcaagccatttgactggtcggaagatgggttatttctgaaccagctgattgtggccgaaaactatttgcgatttgcacttaagtcttttgagcaaaagcggaaatcccacgttgatttacgagaggccatatgaatcagcaacatttggcgtagtataagacggagatacaccagcaattacggttatcccgaaaagtgggaacgcaacgcacctatggtcttaggctgctctacgtaagacctacattccaatcatcaatttgttgctaataaattagtcagtatgcgttatactactgttggaaagcccacagtgctagcagagctcttgatatacaccgcgatgcagatgattccgcgctatgacaaattgtaactatgaggagattggggtcttttttacataatttgacccttagcgaatttgggacgcagtatttagatacctgggggtttacagaacttcaccaaattctacaggattatcttcgctgattaagacgagataaaccctcattaattgcgctgatactcgtagtagaacaccgctcatatgggcaatttggctggtttcgtatgtagatcctattagactatgtatggtgccgatcgctggatgatcgccatgtgagcgtcacggaattaactaacttaaataggttagtggcacttatagaggactaatcataaatctagaccaatcagaaagctgttttgagtagtctcgcggcctggcccgttcatctcgttatcctcacctcactttgccatcaagtggcaccaaaaactatcatcatgattacagagatagccctgctacctgatactctcgctttgcagcgcaatcaggaccttatgagggaatttgagaaggcactcgagataaatttagcagtcaatttgaccactctcatccctgattcctatttttaaaaatatagacacacaaccacaaagtttagaaacaaaaatagccaagctcaatcaaaaaaccgtcaaggaactataggacccccttagaaatgatccaaaggtgcacttgctttcgatttcccccaaactatgctcgtcgttggcgattcgcaagccaaaccagtgaaaaaatagcaaagcctgatataatggaacaaccgaaagttccagactttcggatatgtcttgatagtgtggagatagctgagatcattttcccactttcgaaagatgtgactactatgctagtgcccttctcggatttttctaatggaaataagagtactgagtagccgctactcttagtaccgcgacgaatgctttggaactccaaaaagttatggaaaaatccgatacggggcattgtcgtttaatgcaattataatattattgcaaaacctatcacgataaacggcaactacacagagtatacggccttgcgataccttgaagaatatgttctggaaattcctgctcctagaccctatgcctttatcaaattcggaactttttataagattttcatatcctatattccgtctatgacattgagcgaagcatggccgtatctcttacacaaagagaagatttctatgaagtatcagctagatgtcatctttaggaagttgaggattgtgaggagatagatggccactgtctgggaaggttcggtagcgaaggagtaaatggacacgaaaccaatagaatcgtcagcacggccgctggatttgaccccccatcatggcagcactacatacgcctctttcctccgctcttttctcacagattctgttaaagggctggccttggcccatggtgatattagacaagataatatcatggtgaagctgaatgaagacaatatctgggtagttactgagatcatcgactgggaagacagcgggttctatccgaagtaccacgaatgtactcaactgaccaggacattgagtaacgaggaagataactggtatctctatttgccagcgagtatctcgccgctgcaatttccggtacgttggcttgttgatcgactttgggatatccatatcaaaaccacctagttgagtctccgtgtttgaaatttatttatatgtgtgctccccttcctctacaccatggacagaaacatggagtgtcacggagtatgacatatatctgcagtcagactcattgttatagaaatagcataaagattaaaccaagattagtttcctcaatccgcgatccttacagactttcagcctatcaggtcacaccacatcacgtgatattgtgctcgtacacttaggaaggccatttgcacagttaaacttcgctatttcgaacttcgagcacaataatacgactaagcccttgtctaatggtgttcggtcctgatagtagtgttgtagacatataatgactagtataatgactattcgcgtagagctggatctgtcctactgtctaagtagctagtgagctggctaatggcatttcgtctagcactcaaaatctgcagcgatctgacttcttttcaagattttgactctttgtatgcataatgtatgtacaacatactactcggccccgtagtccgatatctgcccgcggggagcatgtcatcattctggtcggttttgattggtgctgattggtggggggcgatgaggggacaaaagaaagttagtgtcgtttgctgaaaaaaaaaagtaaatctgatttccgatactcacctcgtttattattaatatcatcttgcaaatctgagaaggtgacatatctgaacttatatcaacatccaacttcatccttgaaacgtctccatcatgggttccgattcccctacaagccccagggcctcagccattccgtcccacatgttgaacggcagctccccgctgcatccaacgggcagccgtcattctcgtgagcgcgagagtctcaatacatccattcgttcctcttttgagcccagaattccccttgaatttgaatctcctcagaccaagaccgagaccaagaccgagaccgaggccgaggccggaactgagactggagccgcccccgcccagtccgtctccagtgcctccgtgccaattcgcagcgtcgcgccagtgcggtatgtatacagcgatataaccattaatgataatggtgctttcgattccgttgctaatctctgcctagtcctaccttgaatgaccctccccgcgatccccgggatgaggccgccccattgacacctgtagccactgtcagccggccacagagcccctacacattgacccctcctatcgactttgacggtctcagctggccttgttagtgataccacccctctcggtggacgccactgtattggtaaatgtctctaatcaccgtcacctaggccccggaacaagacagcggaaggagtcaacaccggaggagaccgcggaacggcttgaaaagatgtcaggagctgtccgaacaatcctggaatgtattggcgaggatccggaaagagaaggacttcgtgagacccccatgcgatatgccaaggccatgctttatttcaccaagggctacgaggagaatgttcgcgatttggtcaacaacgctgttttccatgaggatcacgatgagttggtcattgtcaaggacatcgacgtcttctcgatgtgcgaacatcacatggtaccattcaccggaaaggtaaattgccgcagatatcgatactgtgattatattcattctaacaatttacagatgcatatcggatacatccctgaccgccgtgtccttggtctatcaaagctggctcgtctggcagagatgttctctcgcagactgcaggttcaggagcgtcttaccaagcaagttgcgttggcgatttcggaggtcctccagccccgcggcgttggtgtcgttatggaatcttcccacctctgcatggtcatgcgcggtgtgcagaaggttagcagcaccactactactagctgtatgctgggatgtatgcggtccagcgccaagactcgcgaagagttcttgactctgttgaaccggaggtaatgccccatctcgccaaccaacctaacacaggttgttgatttttgaatttctggagttggtggctacctttcaacaggttttgagtggtttgcttttttactttacatcttaagcgtggattggtgtttctcttgtcttcccttctctcggttcttctgcacatactcaggcaaatatttgccctggtatcttgtcatgttcctcgtccatgaagctcacagccttcttctacgggaaatggcaaacacccactttctcgacccatgatggtccgaggaagaaaatcaacccccctcattccctatcctatatgccctttcccctaccatactaaaacaatacctcaagaggcctttgctgtacaatctattgagatctcactcgatagtactagcaaggctgtttcaacacttgatctcatgccgcttacgagcatccagtaggaattctgggagctatccacttagatacaatgtatgtattagaaccaatgtacttattagaatcaatgtacaatctctttctaattaatctctctcttgtttcctcgttgagaacagaaagacaaagctctggtaatggtgtgttgatgtccagcattgaaaagtgtcgagctggaaggcctacaactgatttttatagagctatctggtctctcttagggcttttataagactactcaagttctctaatgcttcatcaaggacgaggagtaatgtctaccacctgcctaggtcttgatgggctgtcaggtagttctggtccctgagtgacctcgtccatttgaagataggtactgccagaggccccttcaaactacactcctcagcgaggacatagttggcggtgaatgactaccagttgcacgtgcaaaggcctctcacacgtgcaccccaggctcgcttgttgtttatatctagtcctctcgcacacacactcttcttttccttcccatccctctcgtctctactatcccatctctccatccatccattgaagtctccattctaatcttgctctattcatcttcatttcgtcctacaaactattgattacttctacttgcgcttcttgcacgttttctgctactttttctacttgacgcacttgtgcatcatctttccaatcctacctctcaaggtctcttaccacaacacacgacgcgtcttccacggtcactaaggtgatatcggtatcatctatctctgtaagttgtctgagtcaatcctggttccttgatatgtgctgtacacaacactgggctcctatgcatatcacaggttttctgaatgaaagtgtgatgtggcatttgcttgtctattgtttactatcattattcttcctgctatgatctatgaagaattatttggatgtatgaggcgcgtcactaatcagtttcctaaaaaaaggttctcgcgttcaaacctatcgaacaccctacagtgtacctgaagtgtttgccctaacaacactgagcaccacaggtatatgaaacgcgtctggttgaatcaagcatgggacttactaacgtggaagtaaagggtcaaataatttatttgaacacaatggagaacgacgctcagcgctcggccagtgatgactcttcgagttccggtctctcttcccaggatgatgaccacgacctcgcccaacccactaccatcaatactactaccgacactagatcctatttgccctctaatgtatcccttgaaattctccaggcgcacctagacgctgacggctctgactcttccgatgcttctggaccgcgggtacatcccgacttcttcgtccatcttgaaaatctacgaagggtcaacgaagccaatcgagtcaacgcacgcagagatgctgaagcctggtatgaagctgcgatggggcacccgcctcagcatcaagatcctttgatgttcaacgggtcccagcatgaagcccctcagatgcacgatcagcctcagcatgatgctcctttcatgttcaacgggtcccagcatcaagcttctcagacgtacagtcagccccaggatggaactcctttcatgttcaacgggtcccatcatgaagcctctcggatgcacgatcagccccagcatgatgctcctttcatgttcaacgggtcccagcatcaagcttctcagacgtacagtcagccccaggatggaactcctttcatgttcaacgggtcccatcatgaagcctctcggatgcacgatcagccccagcatgatgctcctttcatgttcaacgggtcccagcatcaagcttctcagacgtacagtcagccccaggatggaactcctttcatgttcaacgggtcccatcatgaagcctctcggatgcacgatcagccccagcatgatgctcctttcatgttcaacgggtcccagcatcaagcttctcagacgtacagtcagccccaggatggaactcctttcatgttcaacgggtcccatcatgaagcctctcggatgcacgatcagccccagcatgatgctcctttcatgttcaacgggtcccagcatcaagcttctcagacgtacagtcagccccaggatggaactcctttcatgttcaatggatctcagcatcaagcctctcagatgtacaatcagcctcggcatgatgctccttctatgttcaacgggtctcagcatcaggcttctcagactcacagacagccccggaatgaaatttctttcacgttcaatgggtctcagtatcaagtttctcgggcgtccaaccagccccagaatggagcttcttcttcagtgcctaaccaaccccagaacggaagtttccaatttgccaacgaaacaaaccaaccttcgtaccacgccggtaccggaaatggattgcagccatcggcgatgggcatgcgtgagcgatatgaaacccaagattccactgcagccgggccatccgagccgtcgctacatgttcggtttgcgacacctactcacattggtccttctcaccctagagacaatcctcatcagcgtcggcctccttctccctaccctgtggggttccgtcgcccatatgcttctggtccaaattacatgtcaaatcctcccttgccaccgtatcctttgccctcacctcctttgccagcacctcctgtactagcacctcctgtgacagcaccactgcacccggattataccgaacacgggaacccttacagactcgcatctgagccagaattgcttcctgaggatgccatcactcatggtgaagaacgcattgtgcaatcatggctcattcggcagcagcttattgccggaattcctcctcgggaaattcagcccatggcacaagcacgcgaaagacagcaccgaacccctccttacatcatgctcaatgagagcggtgcccatatcataagaattgaacctgcccgattcgagggtgccatgcttcctctcacaggtcttccttggctgccacagcgcgcaaattctagcgcgccagcctcatcggatgcacccgatgcttcgggtatgcccactggtcaagaaatcgcgactggttcaagcttatctagtactctgaactcgccgcttgacccaaacttgttgactgcaccaagctccccgcgcggcctagctgccgccaactcgccggttgcttcgcaccttccagctcctgcaaccccgccaactgtcccaactctcccggttaattcacgcttggctgaaactccaaacttgccagtcaccccggactttccggctagtcgaaatgcactagctactacaactctgctggctactttcactctgcggcctgactctactgtttcggacccaacttctgtgccagaacaaaattcggcgaacccaaatgagcatgtcgcgggaagtctgaacccggatccgcgtatggtggcattcttccagcctcttaggctgcatgaaacgacccattccgtcttggctcccgcggaaatgcgcgtagaagcaccaggcacaacccaggtcggcgccaacgagaaccgtcaaacttccgtggctacactgcagtcgccgtcgcagggcggcatgcccctgactgtgcagaactacaccgatgctgactccatcggttccccgggggctcctgggatggtcgtgtctcccgcccgctctcagggccaagggtcctctacggggaccgacaccgacaacatgccttcccccggggccccccagcttgcgctggagaaccgcgacgagccccccactcgtcgtgtgcatcggttcgcaatcgatggggtggatgagtcggccgaggtgggccgattctctgcggaagcctttgcttccggtgatcaatcctccgggggagggttgatctaaattttcaacgtttgtatgagtgaggcctctctgaggcgaatagtgcttacttcgtgagcacgaagtgaacggcgtgtgagggggttgtcaatctctgaaaaatgagatggagtatatgtagagtattattgaataaacttgtatgattacaattgtttcccatagtaaagctactaccaatgcacgtagaagcaatttctttgtatgtcgtcgcttgatcaatgtaccacggcaggtcacagctgcctataccaatgagcctgatacagaagatgagacaagtttccacgcgcgtcgcaggcgtttccttaccaatagagcgctaggcaaaaaataatactttgcactactggggctaatcccaagtcctgcaatgataggactctccatcacatcgacccttatgcagatgtgaaccgtcctatacagcttaccttgaaggactttgaccccctcataccgctccagctcgcctgcctcgacttctgtatcgagctcccgaaccaagatcgatgcgagcgaataggagcgcccactacttactgctctagctgtacagggtctcggactggatccaaattgggattagcccctgtaagagtagtgaaatcgctgtgacaatagtactgacacagatattgttgcgaagtgcggtctatttacgtacatacagggtcacgtgacctacatgtgaccccacgcccagttccggcacaacttcaacatgcccatgacatcaacctacctctttgccttctcggttcctcgctaagctgattcggcgttgcgggcatccctttatgcatactccgataatatattatgttgaaactaagtccctagtttttctggggaatgttcctttttttcgggtatgaatggccggatgagaatggccgggggtttgtgttccagcccatcccgctctatctcgggctgactttcaggccacgcccttgagttccctgcaaccacatccatatcatgagatgttgctttctcttagattacaaactgtcgatttttggtcctgcaattgatcttgctatttaatatcggaggcggggtgggctgcgcgcagggcctaccaacaggccgcacctttgggggcttgcgcattctactgcattgtactgaattggggtggaggaaccattgtttttaggctttttctgccttgacctctcgtacattgacctcattcggtatgcttcccacattgtcgccggcatattgtttggtcaaccgacttggagacctggacatcaccaacatgaattcgcacccttgtgtggcaggaccatgaagatgcagggcttgcaaatgttggcttgaaacaacatggcgaacagatttccgcccgtgttccatctctgtcccggtggtatttgtcccctgatagtcaaccacgagtctatctgttgtaaatcacgacaaagcttcattccaacgcgcacttttttcctggttcatgatgacccggacttcgacaactgaccaatctacaccttacaagacatcgaagaactgaatggctgggtgtcatacagagcatcaaagatgtttgcgacaaagaatcacagcgtgtcaattcggtccttgaaattgaccaacagctctatggtcttgggaaagaatgataagagactccagccatttatttgatggtgtgacctgataatccaacggggattgtcctggtgccccgggaatgttggcccatctggccttgtgcaatacgtagatagtttcattcgtgggacaacccaacgcagtctcagtttggctttgtcgaaaacaggctgctgtacaaaagggcatggcgagcacaaagcagacaatatgctagcaagccggctagcatgcctgttttatccgacacctgggcaccacctgatcagatcatcacgtgctagcagacacagactggacacattcggtatccaaaaagaaactcggagagagcaaaggagaagtacacgttgcacttatcttcgacatctgcacgccatcccccagcatccaagtgtcgaatcaagttgtagagccgcaacactgatcagtcatcaatcccgaggtccatgggtttctgaccttgaaaagcccaccctccacggccaagtagtgttatttctttacctgagaggttgagacaggtgtatatgataaatctgaactggtgcgtgtgccccattcaaccctccccttgcttatgttttcgttgttcaccagcgcttgatagtgtacacagttcggatctggaagaactgtcgttccgagtcccccaaacccgaaagacttccgcctgcgatcgcagacacgctcgaacgccatcgctcgctgcgctttctcatcattatctctacttcaacgcctcttccaaccactggccgtgctcacattatctatttcgccctgattgagccagatgccgtttgcgacgtctacatggctgggtcccgtacgagtccggtgttaagagaccagtggagcgctgacccagaccgtgatccccgcgacatggatagacggagaggtcgagggtcaggccgcgatcgagggagaaacagaggtcgtgaccgaggccgcccatatcggcccaataaccgcaatttcgatcgcctggggcggtcgccaccacgcgcgtcccgctttggccctgactcttctaacggcatgggtgatttcgctccagatcgatctcctcctcgaggttctcctccacctcgtaactttcacaacaaccgtcgactagatccaacccaaccagtgacaccagccggtgactggaatgcccatacttctggatcttttgacagagaagaccccggtcttcgaagagacgagtcagcaaccggacctccacagaaacggcaaaggactcgaagcccatcaccgcgtggcggtcgtggccctctccctcccccgcgtccaaattactccgataattgggatatccgggatcgaagcccctcattcaagaaacgaggtggccgcaaccaaggtcgtggtgctccaaggagaagatcaccacgccggggccgggaccgtcgtggaaaagaccgtcgtcgtccagacatcccacgcccgggaaggtctagatcaccggttcatgaacgagggttccgtccttcgcttgatcgacggtctcgcacccctggtggtgacaatcacagcgaccacggatctcactatcggtcgaactcacagcactcagtacggtctgcaacctcgagatattctgaatcttctcgcaggtcgaggcgtaactcggcgatgaacacaaaccgaccaacccaatccgttgtggacgatactgctcggcctgcatctccaccgcgcccgattccaagttttgactctgataacctcggtgatctcggagaacaccgagatgagttgccaatacatgcgatgcgctctgatgggaataatcagtctcgccatcggccgtctcgaccacatcttgatagccggccctatgcagacgctcaaaacggaacaacaggctcgtaccccggttcgcctcaaccaccttcaccttactcctcaggaagaggaggatggtcgggcccgcctccgtgagtttttggattgctttcacttacatgttacattctgaattatactaatcctctcttcaagtcatgcctccccttacaggaacgatgactattcatcgcaaaatggaaactattatcacaaccaaggtcaatttaacggccctggcaataatcgcccgcaatctccctatggcgggcctcctcaccgaggtggccactctggtggcggtcatcgagggaacttttcaaaccaaggtcccgatcggagattttctggctctggccctcatccataccataatggaccctcacaacgcggcgcgagaagtcatttcaacaacttgcaatggactgcttcgggatcacgaggccgtgggggacaacatagtcctcacccggcgcacatggatgggtcacaaactcccagtcgaccgcagtcccacaatgaaccgcaatcaccccgagccggcgaaagtgaacatcatcattcccggccccccactagggatgaagagatgaaccaggcacaacctcaatccgccggcgggaatcccccatccatgccaccccaaactcacgaatccaacgaaacaacgccggcaaacaagggcggcaaatttagctttgctttcaagtcaaaggctgcaccttctcccgccccaaagccagtacctgaccttgcccagaggatgttgcaggtccgcgaaccggcccctcgtgcaccggaaccaccccaacaacctcgcaatcggttcaccaatgggccattgcccagatttaagccagactcaagggctgatcgccgtgaccgagatcgtggacgaaatcgggatcgagaccgcagagatttccgagaaccacgagaattccgtgatccacgggaccgcagagatgatcgccggttcgatcaacgtcgtgatcggcggcaaggcgaacggccaccggacaggccctcagactggccagatcgtcgccgtgacccttctccggaaccgccaagagaaccatcaccacccaagcaaaagcggattcttacccgtcctaaaccacgtcccacaattcccgctgagttcgctaatgccgaatctgtgtactaccgaaagccaggaaatgagtctgtgatcggcgctgggacatatggaaaagtgttcaaaggaatccacgtctatacccaacgtaaagttgcattgaagaagatccgaatggaaggtgagaaggatggcttccctgtcacggctgtcagagagatcaagctgcttcaacatcttcgaaaccataatgtcgtcagcctcctggaggtcatggttgaaaaaaacgaatgtttcatggtctttgaatacctttctcacgatttgaccggtctgatcaatcatcccactttctctctgactctgtcacataagaaggatctggcgaagcaaatgttcgaaggtctcaattaccttcaccatcgaggagttctacatcgcgacattaaagcagccaatatattgatcagcaaccgtggattgttgaagtttgccgactttggcctggcccggttcttctccaaaagtcgtcaacttgactacaccaaccgtgtcatcaccatctggtaccggccgccggaactcctcctgggtgaaacccgatatggccccgctgtcgacgtgtggagcgccgcttgcgtttgcatggagatgttcaccaaaaaggctgttttccccggtgaaggtggcgaattgagccagatagacaaaatatacaatgctttgggtacccctaccaagactgagtggccggaccttgtggagatgccctggttccacctgatgcgacccacagaacgaaggaagcgtgtttttgaggacgtatactgcgatgtgctgacaaccggtgcgatggatcttatatcctcgatctttcgctacgacccttcaaagcggccgagtgcggaggatgtccttaaacatccatactttgtatcggaggaaccaacccctcatccgccgattgagtacgttttcccatgcccccgtttgtatatggcccctaataacctttgtctacagattggagcacgttgaaggcgactggcacgagtttgaatctaaggcgctccgtaaggaagctcggcgcgtcgagtatcagaaccaaaaggatcgcgacaagcgcaaggccgacacatcggtgcccagcagcgatcgggattccaaacgaaccaagcaggattcaagtgatcgtgtctctgcgcagtgatgactcttgcttcgcgaattattttattatttattttcttgctgttttaatgcatcggacatggttgacatgattggtggactggggatttactttttcacgagattcactaccctaggtactcggagttctttcgggcttgttcttgtcacatattgcccattgatcaataaaatttagatcaaagttatttgtatggtcaactatggatatcgaaactgtagattcaacaggtggatatcatctaggtaagctaatgcatgtcggttccagtccatcgggcactaaaagagacaccgatatagcatatcccaaaatatatttcaaggctcagactttgcctgttgaccgcatgctcgaccagcccgtgagcccggaggccaaagtagtagggcggttgagtcctcggattaccagagagctcaaaagagtttcttcattgcgttgaaatatagaaatggaaatagagatcgaaatggattgctattgaatacacgtaccctatactacatagacaaaagagacaaagaaaaggatgtgccgtcaatcaggtcatcaacgtttcatgggtggctcgtaagccctcgtgatgatggttttagatgcgatcatttaatctcgacacacacatcggaaacgccagtgctgtaaaaacaatgagtcgccagcgttgatttgagttggtggtcttgatataagaagaaaagaagaagaagaagacaaaagcgaaaaacgaaagaaaaagggaaaactggaaaaaagacggtgcgggctgcaggcgaaaatggggctggccgggcgctgattggccaggacagctgctcctccaaactgcagtcgagtctccgattcatgtcgacacttttccccttcacctgattccccctctatacctctgtttgtctgtttctctattgcttctttttactcaagcctcattacccccatagttcgattcttcccgctttctttgttttcttctttacctgcattactcccgaatttcttcttcttcggaatttcccatcggccactatactacgtcactgacacaatagcgccgacgtctcctttcgctgtgtaacgcttcttacggatccccttctttcccccctgatgaccgctcgtgtctcgggcagtcttctcacccgccgcgatggataatgcaaacctgtggacccgccggacaaagttagtcgtgtgcccctcctcacccaggtgaccattgtaacttatatggcggttgtttcttctcattagctcgtccaagttgtccctgtcaacgtccggagcggacgcgaaagacggtgcccgtgtcgaactgccccgcctatcgaagcgcttcggacccgacagctcgcatggccgctcgaatccattcaacgcaatatccccattgtccggcggagtttcttcgccatccaccaatgcatcctccgcttttggcctggggtccggcgcattcgcctcattcggtgcgccgaagactcccggtggctccgagttgaaaacacccggacgggagtcgcacttggaacacgacgaggccactcgcaaggcctttgagaaccactccgttgctgctcctggtgagcacccgttgaagtctacatggatcgtctggtatcgccctccgacacccaaatactccgactacgaaaagtccaccgtgccactcgcttcgatatcttccgtagagagcttctgggcagtatactctcatcttaaacgcccttcgcttcttcccacggtttccgactaccacatcttcaagaaggggattcgccccgtctgggaagatgaggcgaacaagcggggaggtaagtggatcgtacgtttcaagaagggggtttccgatcgttactgggaggatctcctcctggcgatggttggggaccagtttgcggaggctggggatgaagtctgcggcgctgtgctgagcgtccgaggcggcgaagatgttttgagtgtttggacgaggattgacggggggcgcaacatcaagatcaggtatgtaaaaaagtctgttttaactcatcatattaccggtatatctaacttggttgcagagaaacgatcaagcgcctgctttctttcccggcagacactaacatcatctggaagagccacgacgatagcattgcacagcgctctgccatcgatcaggctcgccacgacaagactgccactggcacgggtcatcaagaacggcggcgtacaggtcaagatgactcggataaggtcaaagtgcctgtggccctataagaggatccaagattccagctggccttggcccctgtatagtaaacccgaaaaaaaaaccttcaatcacgaatcattgggacgcgtttgggtcttagggcggtggggcatcgaggcgaactaagcggtttggtttgattatttatgctctgtgctatgtgtttttctttttttttttgtgtctgccgagcttatgcgtgatgttttcctttatgtacgcaacatgaatgcagcattggctgctattggttttctcgcctggtttgtgtgatgacttggttcgtttgatgtgaagtagagcccttttcacttggacttggccgagcttagcgtcagggctctgacagatactccgactagaactatgtatgcacaagccaaacaaaggtaatagtgcatggtccggggatctgggtacaagaaccaatgtgcaagccagaagccctgataagtatgtattgggttgtattcacgctattgggtattagggcattgtgctattgtgttgaatagtatcaatccaaaaggtatgaacaaagtgaatcattcaacaatacaactgacttatctattcatctattgattgatctattgatctattccaagatagttagttagttatcaagaatgaaacctgcatgcctaaagcctcaggcgccaacaaatgctcaccgccctaggaccagatgacgatgcggcgtgcttgctccgatgaatgagaagaaaaaaaaaaagacaatagacaaacaatcaattgaataggatctatgcaatgcatattgtcatgacactgtggctgccttcatgcctgtgtttaaaaacttagtcgaactcttctctagcttgtcaccacgacgcaaacgtgagaccgaagatcaacgatctgctcttcaacgggcacaaccaccgctctcgacccctcctcgttctcgaccagctgggtctggtcgtaatccttttatcctggcacctgacgaacccgatctgaccgaaaccacatctccccagaacgctgcgatcgctcctctttcaacggtgtgtatctcccgctatctcgattctccatgcgtcttagccatctatgctcctttttgataactcgaccctgcacaatttcctcgcattgggcacttatctcttggctccgcatgttttcttattgcaaactaccttcgggtatttgacttgggactaatctctcttatcaggttgttcatagttatgtcgattctttttcgtctccaactggatctacaaccgcagaagaaccattgcgcacacgtttctcccacccttctctgagtcccattacccggttagacatgtcccgacgaaacccacagaactcccctgccggcaggccagagctgatgtcctcatccattcccaggccgggtgattcgtcgcaaatgttgaacaaggaccagcaaacggattcccagaatcggaaagatgaggctcggttgcttggaggcagataccagtatgtccttagtgtgtgtgttgagttgttcgagatgttgttgctaaccggctggctttttgcttggtagtgactctaacgctgtcaagataaagctcggagcatccctcaatgctcggaaaaagattccaggggtaagtttccgcctttatatgaatggatatggcatgtctaatcctcggtcatagtctaccttcgcgttctccccccgggacaaaatttcacagaatcgaaatacccgaagcagcgggccagtccgttcttacggagaaccaaatcaacaaacttcccggagaaagtcgccccaactcgaggatgagtttgaagagtcgaatcgacctaccaagatgcggcgccagagtaaaaccaacgaaaccgtcgaccttacggccccaacgaaatcagccagaaatcggttggaacagggactctaccgccacccaaatgcaattcgtcgcaaccgacttgaaggttccagggacgcggaggatagcgtcaaaggagctgcgcaaagctctaatcgtcctcgacatgaccaattatcttccgttgactctcgggatgaaatgtttaccgaaacagcagcacagcagcgacgaaatcaggcggattccaggttgtctaacgtaaatggcaaattaaaccaggctgcagaggccgttgttattgggagcattgaggttggaccaaagagagctgatcggaaccgcactgcagttcctacgagcatacatcgtcctgtcaacggcagagaaagtccagacgagcttcagggggatatcaccacacaaccagtaccgagatccttatcgggaacacaactccaagccactcgcccatccaaacccgaaattcacatagaaacatcgactcgaaaacgctctccgtccgctacccgaagtccagacttttcgccgccaacaccggtcatgaagaaggctaagatatctcaaaagaactccgataagatacacctagtgcgatatttccgaatcggcaccttcggcaaatcttgcgattcgaggcaattcgtcccaatttatctaaccaaggatggctttgagcttcgtgagaatgcactcggccagggtaacacgatatcaataccttttcacgaaatccgtcaaattgtcgtcggcgagacgcctagccggaaagtgagaatcaaaatgttgcagagtgccgtcaaagaagacgatcagcttgacgttgagttctggaccaccgacgaaaagagaaatttcctggaagtgttgggacaggcgaaacaggcccagcgtcccaccaaagatatgtaagttttgtgggctatctcttggatgagttcgcgattcactaacattgcaataggaaatggatggacaaggcgtttttgaagtatgaaaaacaatttccacgggagaacaagcggcctaagaagcggctacttgatgacttggtggacgatcccgatcctgagcactctcctcctccttcgcgacggcccaaactttcaaagtccttgagagatgaccatggtgaagtcaacaatgtcaattcacttgagatcaaatgcgccgctcaggaaaaagtaaaacatggaaacggcaatgttgattctcgaacgtctgccaaagaacaacagaattctcgacctcttgataccgatagtggagctgatagtcgatctaccgttaacccacttgaacgcgagacccgctcttctacccgccgtggcgctaaaaagctgtcaaatggagacgttacatctgaagcaaagtcgaattcatttcccagggatgattctttcaggaaaaattggaagaaaccgttggtgtatccgcgaaatggaaagaagaaggctgaggtgacactcgttgatcgagaacggctactgagggacgacttcctgaacgataacctcattgctctctacatgcgcttcctccaggatcatcttgaacgcaccaacaaagaggctgccaagaggatctacttcttcaatacctacttctttgcgactctcacgaataccccacggggggaccgtgggatcaactacagtggtgtggagaagtggactcggaacgtcgatctcttcagttatgattatatcgtcgttcctatcaacgagaatgcccattggtacgttgcaatcatttgcaacttgccaagcttgtcccttggttctgctgacgccgtagagtcggttcgaagaccggctctccaaaaagaatcatccaatgcgtctgagagtgagatccaggaaattgaggagacacctgagccggaactaaggtcaaagtcagagctcaacggttctagtgaagccaaccaacctcgtgagattcgagagggatctgagaccagggggcagactgagggagatgagcatgcgatgaagccagaggagcagtccgcatccgacaacccacttccacccccaaatctctccaaattcgcaggccaaaagctcgcccaggaccaggccgcggcgtcacaaccgacaaccaaatccaagaagaaaagaagtgggttaaagttagatccgaatcaaactacgatcgtcacgttcgattcccttgatatgcctcgctcccccaccatcaaaattctccgcgagtacatctgccgcgaagcggagtctaaacgcggcgtcgaacttgacccgaacgacgtcaagggcatgcgagctcgtgatatcccccttcagcctaatttctgggactgtggtctttatctactggcatatctagagaagtttgtgcaaagcccggattggttcatcacgaaggtactacagcggagcatgaattctgtcgatgactggcctccactaggttctggtctcctgcgataccgctttggcaagtttctcgatgatctatacgaggaacagcggcaagccggcgagcctatcatggcagtcagacggcctatttcattcctgcttggcccgcctcttccttgtcaggacgaaattgcggatgttgatgtggtacctgagtctcagcatgagacagattcttcaaaggacattgcgaaacctgtcaattcaaagaccgaagactcgagcgaagattcaaccgcggagcaaatgcatctcttacctaccgaaaacctcccgaaaccaaaagacccgaaaccgaaaacatcaccctccaacccacctgcagatgcgaagtcgcaaaatgaccatgttgctccagcaaagggggaacccatcatccaagtacccggtagccaggaagagcccgaagtgccaggcacaccgtcccctaagaaaaaagaacgaaggaaacacggccattcgcgaaagagatgaatctgttcatgcaagtgatacagttattgtcaagacgatatcaacacagtaccggctggaccgggactgaccatcatgaatccaaatatgttcactattgatttagcgtttaacccatgtacgcagcatggcaaaccctgcgtcagcgttcgatgaaagaaggatggtgttgttttttcttcgtgtctttaatggtcatagcataagataccatcacctacatcgaaatgcaaacttaatgtcttttccgagaaaataccaataatatatgtaattaccactcactctcatccgcctgaacccaccacgccattttatccctcttaaacgactcaaaatcccactccgaatcctcaagcatatccttcccagcagtataaacataagtcatagccaaaacttcctccccctcagccgcaacctcagcgccggtcgtcgcattgagcatttcgcgcagctggttctcagcagcaccctcgctagaattaacgtggtcaccacccaccacagcccgcagcgtgcgcacaataacccgtttcttctcatactccgatccctcaaatctgtccagtcggtgaacgtcgccgtctgttagtcccgacacgagtgttcctacgacggacgtcccagcgctggttttcggtgcagataaattggtctcggtttctgtctctggcaccgccacgatcccggggtaatcggcgttctgcacacgatgccgtcggtacccttgtagaatggcgggttggaagcggagcatggctttttgccagggctctgggttcgcctggccgtggattactctgtggaggatttggggcgccattagggttcctgggtagtttagttctcggtttctcttgattcaagaaggacttaccgtagaagaagaggacgtggtcgcccattgtgtatggtgtggggtcgggttggttattgcgtggggatcgagggaggttccaagataagaaattctatagagcttgaggtaaggtaatatgtatattcgcaaattcagtagaagcttagagtataaagagaatcacaagacaagagaagagaggaacgaagccatgagagttgtgtttattgcggagatgacgagtttatagatgcgcttatcgataagaccccaagatccaaaggcccagctggcttcatcttcccaattcgtcccccaacacaccatgcattcctccctgaaccgcatccaggccgtattcggcttcttcactacagtcgcgctggtagtcagcgcactggcagccgtctcggtcctcttcttcccagcagacgagaccaatgcctccgtgcagctgaagaacgtgcagatgtaagtgaagtcgcgatttgcagccctaagacttcgcaaaagccccccatttactaagatccgatttcgcggtataacagcgtcaaaggccgaccgcactactactccactaaacgcgaagaatacgcccagttccgcttcgacctcgacgcagacctcagcccgctcttcaactggaacacgaaacagctcttcgtctacgtgtacgctacctactcctcctccgagaaccccgactcgcaggtacgcctctcggagtctatcatctgggacactatcatccccgcgaccccgtcgccgtattcatgggagatcctcaaggataaggtcatcgcgcttctccccgcggctgttttgtcggattctgtcgccgctgcacagaggaacgctaagcgccatgctaagccgcctaagaaggcaaagaataagaaggcgaccggtgtcctgaggctgcgtggccagaagggtaaataccaggtcagtgatattaccggtcggctggcggagcgtcagaatgttacccttcatgttgggtggaatgttcagccgtgggttggtgctttgttctgggcacctggtacgggtgctgtgcccaggactgccggtacgattgtcagcagtgagccttttgctttccctgaggagaagactgctgctgagaagagagctaaggaggcagccgaggaggcggagaaggtgaaggtggagaaggcgaaggcagaacaggccagtgtataggctttgattgggtctgttgatatagggagttaggatctacctttttttgtttacttttgggagctttggctcgccttatacggttgcattttgggaatgatacatatgaaacgcatcatcattggatagtgcaaacacagctttgtcatttcattttttgttttaggtgtccggttacaccatgaagaacaatggtcgacgctatggatacagcagaggtaagactcgattaggtttaacgtcatagagaatgccgaccgtggacagactaagacaagcatctcgaacaagatagtccggagttcgtccaaagcaaatcaaatggtaccgtaattaacgcctgcgggtggtgcatgatgatgacctccgttctggattcgatcggagtagacgccgggtgcgggttgttgagaggcacgagtcaacggatcccgattgcgacgatcataataaacgtattccaaatagaaggcatggatgtgtccggggaagtaactgggagatatcgctggttagttgtggaatgtaacgggaagtctggatgtatagcactcacccgagaagtgtgagcaggaggttgatccagaagtcaactccgcagcctgaaatcataaaaacaccaagagggggaactgtttggttcgttagcagatcattctggtggataggttggtagatcgaggggcggtggatcactgtgtggggatgggttttgtggtagcttttgatgtaatttccaacagcagaggtgtttacttactgaatatggtgatgatgatcaaacaaagcatggagcaagtgccggccatgattgcggtgatgtttgatgtaggtgttactgttcaggtttggtagatcgaggcttgaaatcggtagtggccaaaaaactaagaaggagaattgcaaagaggaggatgaagatataaataggggtgttgtcctcggcgggagagttgttgcgtttcatcttgatcttggccacgacgtcacaaggtctgagggaactcgtacatagggctgaggcagccgtgaagctgatttgctggctgagtacatcatgacgtcatctatagctggcacctggacaccgccacatgccacgagtcaatacgtggctggtggctgtacagagacggcaagtacaattgacgggcacgtacattgaacggacttggagaagatgtagaggtactgggaatatatttcctgtgatatccccagtatcaggtcctaaaccgcgtcaatcgccgcccgagttgtaacctgctcgttcttgttgccgagcttcgagaactgcaagaatgcgtccactccatacccttccagactgtgcagttctaaactgcctgcccaatattcagcatagactcggctcatagggagacccatccccagacggagattgggcggtcgggatgtcaatgtgtccagggatccctcatggtatgattctcggtcggtgtgtttacggtcgtgtgacacttgcagttcttgcatcgtcgccgccattgcgggcacctgtccgagattttccagccgtgtttgcgtgcgaggacctttgctaaaagaccacagatacggcagaatctctcgagggattcctcctccttgatcagatatgcgcatgatcacatgctgcggggtctcgcacacgagcacttcgatagggggtgggggttcggttgaatcctgataccgctccatcactgcctgcactgagtttcggagaagttctccgatgatatattccaagtggctcaatatatatgggaaggtcgcgtcggcatggcccttcacgacgatcgcggggatctgggtcgaccccgatatcttcttcatcagatcttgtgcgacctttccacaatcctcgattacctccttcgccttgcactttaggaacacttcgccgacaaattctgcattgatgtcggttcggtcgtgggaatcggggaaatgccatggtgagttgaaagtttcggtcagagctaggtgctgctctgcgatgactcggcgagagattcgctaccgataagatacttgtcagctaggaggcaggccaaaggtcgaccttacataccgctcgcagaagtgtgttcattaaccggtccatttcgtccgctggggcgagatttcggcattccagcacgcctatcgccaggttgggaattgcaaccagatgttctcgtagcatttccttcaggatgtcacagaaacggtcattatcgtcaagcgtcttaatctcaggaaccacccgagccctctcgaatgctttgtagtacagttcgtatacaagggtgagatgggggttggcaactaccacatatggcagctgctggatgtctcgcagacgatgcgcaaggctgtcgatgaccctgatcagccttttattttctaattctgcaattgactctcaacttaccgagtaggaagctcggtccgcacgtagtttgcggagctgataagtcgtggttcggtcaaagtacgaccaaagaaggtcaactgacgaagactgataggtcgaatagctcgctccacccatctgccagtatatcctaattagtatccccggttcaagcatcggaaatgtgagtcatccatactcatctactgcagaaactggccgccatggcggcgggctgtgagctccagaatagaggcgtttcaagggggattggaggagctgccagcgtctagctggataagacaatctcattgtgctccatggacttattcaataagtgacagaccatagaagtgctcactatcttgtgcgtgcgcgtagttgggacttcaagagtttggggttgccgggcggtgagccaagcatgtgacaccgacacaaggcttgttatggcaagatctgttttttgctgtctagatcgggatatatctcgatatatatggaacgttctaagactgcaaatgccaatgtcatacgatctggattctcgtccgaagatgcctcgggtataaggcactcgcacggactggggctaagctcgtgggccctttccaaggttggatcatctgagggccacggcatatttagtgattgagagcataattaaagaagtatatagagcttgcagaacttaaacgtatttaggtcgctatctatatcaccgctaaatcggcccggtataaaaatagggcttttcttcaccgtatacttcgcatctagtcactcctgcatacattattgcacactgccaactaagcaaactccttttagttccaattcaaagtgagcgacaagttagagctcagtaaaaaaagctgtcaactgcagaaatcaagcacatcaaagactgttttcacagacatcatccaccaatatcactgccgagccctcgaggctccgccaccgctagctccggcccttattattttgcgggttcagacgaatttcctccaccaccagctctacagtgtatttcttgccaacattccgtcttcttattcacaaaaatttcctcaaaatacaacctctgacgccttccgggacgggaaggcgctttccgcgatggaaaacgtaagagattccccgaccgtgcccctcgctagtgtcgtcattggatctaaccctgctctaacagctcgcggagaacgacatgcttgtcgatgagtacgatcaataccctgccgaaaagaccgatgtcgtcgtcgtatcccgctcggggtccgactcacctgagtccgcgccgaccgcagatgaccgtatgttctttgttgcttctccttccttaccacaagcaagagggctgtttgacgggttagctaggcaaagcatggcacccgaatgagatcgccctcacgctgtgcactgcctctttgcttatttgtgctaagcggtcgctaaccaagagccccggtggatatagatgcggcgatgatggcaaaggtcctcccccacaacacggacctcgaaaccctagacgaggtctataacacatggcgcttgtcagactggcgcaagatggagcgcaagtcgcacggacccgtcttccgatgtggtggttcaccttggtgagtgcttgaaaactctttgcctggattggctccatggctctgtgccggcattgaatctgacacggaaataggcgcatcctcttcttcccctacggcaatcagaccgaattcgcctcgttttacctcgaacatgcgtgggagaacggacccccggagaactggtacgcttgtgtgcagtttgcgctggtgttgtcgaacgtgaacgatccttccatttatacacaccatagtaagatattcaattccggaggaatcgcttgatcaaaacgctaagtcgaattctagttgcaacacaccgtttcaccgccgaggaaggggactggggtttcactcgattctccgacctcaagggcctgttcagccatccgtgggagggaaaatccgtcccgttggtgcaggatgacgaggcaattgtcacggcctacgttcgtgtagtgaaagatcccacgggggtcttgtggcatagtttccaaaagtgtgttttttccgcgaggtttgacccgagtgaagctaactttctctttttagttatgactcgaagaaagagactggaatggtgggattgaggaatcagggagccacatgctacctgaactcactgttgcagtcgctctattttacaaatgctttccgcaaggtatgaaagggaaaagttcgattgctcccgaattatggagactaatgaaactcgttaggctgtgtatcaaataccgactgaccaggaagcttcgcgtgaaaacagcgcgtgggcgctccagagactattttacaacctccagaccaatgatgttgctgtttccacaaccgagctaaccgcatctttcggatggcaatcgagtcagatctttgagcagcaagatgtacaggagctctcgcgaaaactcatggaaagattggagcacaagatgaaaggtacgattgccgaaaaagttctgccggatctgtttgtcgggaaaacaaaaacgtacatttcttgcatcaatgtcgattacgagtcttctcgtgtggaagacttctgggatattcaactcaacgttcgaggcaacaagaccttggatgacagcttcagggattacattcaggtcgagaccctggagggggagaacaagtacgaagctgggcagccatacggtctgcaagacgctaagaagggcgttattttcgagagcttccctcccgttctgcatcttcatctcaaacgttttgagtacgacctcaacctcgacatgatggccaaggtcaatgattatcacacattccctatggagttcgatgcagctccttatctttctgagagcgccgacaagtcggaatcctgggtttaccaattgcacggtgtcctcgtccacagcggtaacctcgatgccgggcattactatgccttcctcaaacccaccaaggatggacactggtaccgctttgatgatgaccgagtcaaccgagctactgacaaagaagtcctggatgagaactacggagactcccagcagcgcacgaacggagcgactggaggacggtccgctatccgcacaaacaacgcctacatgttggtctacatccggaagacaagacaggatcaagtattattaccggtcacaaaagatgatgtgccctcccacatcggtatgttaagagattttccttcttaggagaattggacggctggctaactatggaatagagaagcgtatgtcagaggaccgggcggagatgttgcgtcgcaagaaagaaagagaagaagcccacctttacatgaatgtcggcgtccttgacggggattcattccgaaaccatcatggcttcgatctgactagcaatgacctacccgcggaagatccggcgcttcccacgcaatacaagattcttcggacaaagaaagtcagcgaatttgcacaggaaatcgccgaagaacgaaaactcaaaccggaagccattcgattctgggtcatggtcaaccgtcagaacaaaacaacccgacccgatcaggtgatccgcgatcaggaaatgactgttgaggaggcgtacaacaaattcggcactaaaggtcagatcttccgcttgtggatggaggtggcgccgaccggcgcagacggacaacctactccatggcccgataatgactcgattctcattttcctcaaaaactttgacattacgacccagaccttgactggtgtttgctctgtctacgtccacaagagccagaaggtgagcgaactggccccgacaatcctttccaagatggattggcctgccggtacagagttcatgctctttgaagagatcaaacataccatgatcgaccttatgaaaccaaagcagactttccagcaatctgaaatccaggacggcgatatcattaccttccagcgctcaatcaaggaatctaatctgccaccctcggtactttacacagacgctcggcaattctacgattaccttttgaaccgcatggaagtacaattcgccccggtcaagaccaatgagggggaaactttctacttgactctcagccgcaaaatgacctatgaccagttcgccaagaaggttggtgagcatctcaaggtggacgagactcatcttcgatttgcacccgttatggctagtactggcaaggccaaacctttcctgaaacgaaacgtcaatcagaacctctcacagatccttaacggtcaatatggtgcctacgggtacaccatgcaccgggcagatgctttgtactacgagatactggacatgagtttgacggactacgagagtaagaagtgcttcaaagtgacatggctccccgatggcgtcaccaaagaggttagtgttaagcattccatatccatgccgcagggctttggctaatattcatctaggagattgttgagatcttggtttcccgtagcggtaccgtcgcagatcttctggctgcgttgcagcagaagttggaactgggcgatgagccgatccggattgccgaaacacacagtggaaaagtctacaaagaacttcggagcgaccaaagcgtggctgccattaacgagtacgccacactgtacgccgaaaagatcccatcggaagaattgaatatgaacgccgacgagcgcgtcattagcgtgttcagcttcgatcgcgaacccagccggactcacggaatccccttcaaatttgttctgaagcctggagaacttttcgcagagacaaagaaacgcctttccgcccgcacacagatcaagggcaagaacttcgagaagatcaagttcgccgtggtcccccgtgcatccttttctaacgccaagtatcttgaagatggtgagtgccttggctttgattccattggtcggactgactaactcctcacaggtgacatcttgtcagatatagcggctagcgccgatgacttcctaggtcttgatcatcctaacaagagccggagcttctggggcaagagtgatggattctccattcgttaaacaagtgttaaagtcatggcgctggggggggggttacgagtcgagggctatatgctgcaatccggtacatgagcagcgacaccctgatgcgatgatcatgcctttctcttttttttttgcgtatttttttcatgtaaccagtcgaagtagaagacaataccgtctgcatgatgagtgcaaattgtttatttcccatgtgtgttgtgtatccctacaaaatagactcgtgaagtagtcagaagtcgacatatgcggaagtttgtttgggtgcaaacaagtcaaacagccgaagacaaagttggcccgaacggactcctgacgcggatatcatcccccagttcaacggtccctctcggtatatctgtctcacaatgcggttcgctcttttcgccggtctggcctccctggtctcatccgtcaccgcaactgccctgacctacaggctcgaggcgaacgagaaagcatgcttcttcacaaacgttgagcagagcaacgccaaggtggccttctacttcgcggtacgtccaattggttattcatcaaacacattcattcagtgatattttgttatggtcgcggagctttggatacatttggtggtgccgaatgctaataatgtacgatgcaggtccaatctggcggttccttcgatgtcgactactccgtcaccgcaccgggcggcaaggtcgttttagacggtgccaaggagcgacagggcgactttgtcttcactgcgcagagcatcggcgagtacaccttctgcttcaacaatgagatgtccacctttgccgagaagatggttgacttcgagattgcggtacgttccatatccatcgacttgacgaaccggtcaacaaatgctaattgagccattgaacctacaggtcgagaacgaacagcgcgctcaattgccctcccgccagggtgctagccccgagcaaaccaccagtctggaggagtccatctacaagctgtccgcgcaactctctaccgtctcccgcaaccagaagtacttccgcactcgcgagaatcgtaacttcagcaccgtgcggagtaccgagcgtcgtattttcaacttcagtgtgattgagtctttgatgatggtttccatggctgcgttgcaggtctttgttgtgcgcttcttcttccagggcgcccggaaaggtatgttcatatgttccccgtatttgagatcggatataggcgcaagtcatagtcgtgtttggactgttgccgccgctgtctgtcctacttggatgattcgtaataacgattatttaaaacaggttacgtgtgatatgagcatgagcatgaacaataatatgatgcattttactacctctatgtccggcgtgttggcctagttatttctgttgcaaaatctatgttcttgtctgtctagatcaaaatatactagtatggtacgaagtagttggcttcgagtcatggtggtccgttgatcgtatgtcacaccaaaggaaagccattgaggtgaatatttggtttacaaaagaaatatgagaaacacgaattcaaggctgatggtctacggtgtttcattaggtgggggatagtaatcgatatagtttatactaagttactaaaataggggatttacaaatcactaagagaagatgggttgacacgccggtatgatgaaaagacactgtgatagcgtatgcccggcacgctcgagatgcccgatattatacgttgtaggccccaagtctccaaatcactcttccagagatatgaacggtgtccgtcgaagacattgtgcaaagaggaggtcgggtggtctgcgaacgacatcaataagcaccgacccatagcgcagttgggaaggcgggggtgatcgttgcttcatgttcgtatatgttggtatatgctcgcagggatagaaactgtttatgttagatggtcttttgttgactcgaggccgatgaaaaagtgtgtcgatgttgtgctggacccgttctccattgttgcacctctcccgatgaatgcagccggggaatcagatactcaatgctcgctgctagcagggacagcacctgtttctaggcgaaggataattctgttagaatgtggaattccagtatgtggaatggcttacaacaaaacaacatgcgaccaggatccagaccgcagagcaaaggcgtttggaagctcacatactaatgagtttctaaccggtttcatacgtcagtcatgcattggatgtcctccccatatgtatatgatgccaagtccaatgcattgataaaccttggaatactatgtagcgtgctgagtgttgtctacaaggtacggggcaatgttgtacaaagtaccgtcgagatcgatatctgatccaaaacaggtttttgactttcaatatacgaggggcatgcaacaaagaggatcgataataaatgtgtggatatagggttgtcgatgactgtcttgcccaggggcatcagggtaaggagctatgtacatatgacgtgaggcacttccggtagaatcgactaataagaatcgactagtgatatcatatgcttgctacggtgtacaagatacgttgtacgctaagcttccatcctctttgacctacatacaatacatcatagatcgccgtcaagaggctgtggtgtgatatcatttgagatacgctggggattgtcaaaccccggtatctgactcaagtaccgtttacattgatcggcggacagcaacaatgtatgttgtatgtattgttttccgaatcgggaaagtctgatctgagcctcgtcatatgtaatggtcttttgggttcatatctggtttaggtcttcagaccaggcacgagatggatcaggataatgaagaaagtggatcgtgaaaaggcattgattggcattcaataagcagaggaagacccgcaagtgcacaatgcataatcgcgcacgcttgtttttgacacgctccgctgttgatacaatccacatacattatccgatgctgtcatatctatgatcagccccttgaggtggaggagcggtgttatggatcaaactctattagactatattgtgaaacctacattgtactccacaagtgcctttcgacttgcgacatcgcatagaattggagtcaatccttatacacattatgtagtatcatagtttctccaccaattgtaacaatatctctctggatctgcatattgtagcatgataagctcagtatattacttgcattggtctagaccggtgctagctggattagactgcttcctcagaacaggtctagtttgaaaagtcagatagccgatcatgactgtaacggacaacataggttgtgtttcaaacgctcgtcggacgttgctgtatgtctcgtacatgaaacatatctcggggaaaaggagatctgatatgctgggcataggcctccgcttgccctaatatgtcagatatgtcagtctaggtttgtagtagtaggtagtgtgtcaccatcaagttgggcaaaatgtacaacatgatgctgaggcaaattatcgtgtatccggtgtcaagccgatcttgcaataatttgcctccccccctcccggctggcatcaacttccgtccagggttcatggatggcaaatccgtaccctcctccaccgttcttcggttacagatgatcctaccactggctcccacgtgtcgtaccgatcattcatgccaatatcatgtccttctagaacaatttcagactccaacaaggtggaacgaccctggtttccatatcggaacgcagtcggtcgcgagtttcggctccgactctattgataataggatcttttggttccagtaccgtgcttgagattcatctgccggaagtcagacttatttgcgattagacacaatatcgagtagagctgtggtcaatatacaaacataatatcatttgaagatgagggctccctgacgtcaggtgctattctgcctcaggcatcaacgctaaaattctcaaatcactagctcctctccacacgcccccatttctccctgttattttgtccatttctgatgataccgcggcgaataagacagtctgagaattaattaaaccttcatctgctgcaagctatgtctccactgtggctgaaagcctccatgcctttgatacgatgtaccagaccgttccggattcaagctcagttccgcttttgataatcgaaaaccagcctcgggtagtaactcctttcgtttgccaaatctacgaccggcgaatctccgccggccgaaatacaaacctaaatcgattgctcgggtcgccccgatgcctgggggtatgacggcatagctccgttcgacctgagcctcagctacgcaacggcacgcccctttttctcctgcggccacccgggactacttgatctatcggtttattttgagtcaatcgagggatccagggctctcgttactccgtactagaactacaccctgaattgcggcttttcaaccgcgtattgaccactttaccactcctgcgccgggtctccactagcgatgtccacattttccttcacaagaacaccctatcccgtagcgagacagaatgcaagatgggcctcgcccctcaaaagcccataggaattcaattatgattcgtcctgcggacgtcaggcaaagatctgcaggggaccggactgtaattgtgccgatctaaaaccgccttcgcctctcactggtcatccacattccccagtgacctcatcggagaacggtgaccaatccataggtggaacaactgatgatatcgctcccaaagtgcaccagtctctgtgcacatgtggatattagttagttcagaacatcctctgatgatgatttgaccccacaccgtgctcctggacgtacccaataatcggtcgacgcggtcacttatgtacctcaaaaaaataagggctggggtttatggatgctcggtttatgatgcttgtgatgatgcttcttatgatgtcgcttaggagaaattatcctcccccctttcaccccccccccttttagctaattatgtcactgtactccgcttggtgtaatcggtagagatctcgtgcttaccatggatgaagcagaaattaggcaccctattggcctatcagaggcaaacataggtgcgtttgcatcaacaatccaccgatgtgatttcatatatataaaccttgctcgcagattggatccaattgttcttcgtatatgccctaactcctgaatctgccccatagcactttccccaaatatttcatgcgctggcccggacaacgtaccgtcggactttcaatttaacatcgcattatctttcctattcgcaatctttaggacctttactattcaactcaactgccaaacttggttagatcttgaaatattccacaggtgagtgaccttgaattgactggtaaataccatccggcttccccacggcacccctccacggggatcgtcccatacatcagccttatccccatgccgtcctatattatatagcacacagaccgtcatgatgccactgatcagcactgttagcgctgcctgatactttgtcttaagaacataagctgactcgttcactactagccattcttccaccatgactcactccgctcaaacgcaacaagcaaccgaagacatccactccatgttcccaactgctggcgtggacaacatggccagtgagactcatgttgaatcttaccggtcgcttgatccctctgccgcctcgctagaggactacaaccgctccatgctggaatacacccagcgccaaatgtcttccttcgtcgacacggataactctcgccgtgatagccggagcagcggcaagagtggccgtagcctcgcctctagcggcagcaacatgtcccgacaggccaatggacctctcacgcccatcagcaatgccgccccctccgccgagaacaagatcggtagccgtgacatggccgacgctaagtctgctgaatactagggctgttctctgtcaaggtatgcatttgcccccatcttggtgtctttgatccagaaatgctaacggacgtcttttcagcgtcctattccacagaccgtgatttaggatcataacgatacatggcattggcgagccgttgatggccttattgggccgtcggcggccacgtctaatttccgtcagtgcctacccaaatgcagaattttctgcggagttttatgagattcgtgcgggagagcgtgcctgctttcaagcgatatattgaattgtttatttttttctacattgatttctatttggcctcggcttgtctgggtcaattatgaaagcgccttttctttccccaacccctttttaccaactttttatttctgctcggcattttcaggatatccgttgactctcagcgtcgaagatgtcttgaatccctaccgtgacttttacctactcattcttgtcacctgtgacggctttggagttgctccttgaactgaaaagcagtttacaaacgatatttcatccccatttcgaaaatttctcgaacgctatccattctcctggggtctgggtatgtgatcaatgcttgatattccttctggaaaggaatattggcctgtacattacttgtacttgtacttcatccgagcgattctgtgctttttattctttttgattcgatgtgatgaaccaactttcaactataccctgttacgataccacctagccatgttggccattgatgacctgtacaattatgcacaatcgaaccggagcaatcttgtttttctgctatttgttggtgttttatttcctttctcctttcttcttctccattggctggatatagctcgtactgttgtagccccgcgtagtacaaggggttcgagtggtatgaaagaatactggctttggtaactagttcatttgtgttatttatcaagttatcgaatgggggctgaaccaaggcttatgatctgagacaatttgacgtcaccgcaacaatcccattgtggcttgaacgaaagatgcgtttatcgcgcctgctttgtaatcttcaatctatttttgcgcctttttcgggtttgtccggtatcttttctagttttttgttgcaatacatatgtaagcggcaagccaccggaatagaaggcgaagcaagcagaagaaggagaatatattttgaaggaggttttggacgagattggtgtcgatctgaatcaggcagttcgttaccaaacattgcaaagtggatttcatccacagtttggggaaacaccccaacaaccctcatactccagggaatgcttgacgggttaacatttgcggcttgcaggaagcgtcttgagcgagaagtattgtgggattggtggtacgcttcgaccagagtaaagagctttgtaagttctcgttgacatccacgaaatactacacccagcatcaatgagaatatcataataaatgcacgttgtgctcagaaacacaggaactgggaatccttcttcgctctgtgcatgtgctactgaatatttgttcctcatttccaaatcgaccttaaacacaggctattttgctcagactcgataatcgcggggtctcaagatataacgcattcccaggaaaattcttttttcaaattgaccaggttcagccttatcatagcctcgttcaagtttaattcggaagcaaactgtgctcaggtatgaagcatagagcattatgcacggaaggtggcctttgtgcgcactgaaaagagactagtcctaattaaaactcgtgcgcttcttatctagttgctatacctcccaaccgtgaaaacgtactgagatccgtcttaaatctccaccaagaagttgatgatgccactatctctgccactatatctaatagtgccattttcgatgtccatgcccatgaggatgcattcgagcatgagcgcctccagtttcccttgctatcttgttggtggacgtctgagggctggcagtctgactcgctacgaaagtcttgtccgagtatgatgagggatcagtagcagtaggaggtgctattacctcaccttcgagtatctcggcggcttgttctgtctcgtatatggcagaaagaggaaggtcctgctggagaacagagcgagctacctcacgctttagccactgagcagaaaagatctcggttggcagattttcgtctgacggcggagccctgtaattattgaaggcaggccagaagtagggacgcatgtacattctgttcaacgtttagattagcgtaaatgaactttgagtgaggtttagaacagggtaactaacggatcgtttggcattgcgcggaatccttgatctgagacagtggttgtttgtccccatgtgtaggttgctattaatcaagccgcatatcagtattaattgagagtgatgaatcggggaaatttgcaagtttcaagcttaccccagcatgaactatccctggtctgggaatcaaactgcaggccgattagcgccatttggctttccggtttagaatcgcataccccataatacggtataaagtgttcatcatctaacctcgcataattccggtggtcgcctacagggaaatcaccgaatttgacagtgatcggtggtgctggtttgccttgacgagctcggagggccgagcatgggacatatacggcggcgagccaagccccatagtcgcgacctagtagaatctatcagcatcaaagatgattttgaggaatttgctccggtaaacgataaagattaggagacatgacagacctaccatggagagcattagctgggccgttaatcaagcgcactacttgatatgcgtttctggctgactctaggaatgaggcaagaggaaactcatctctggagatgtcactatgtcagtgtatcaagattcccagtttgacagactggctgagttttactgacacttcgcaagtatatctccccttgaaatttccttcttcaatctcctcctttcaggcataccactgggctcctcttttctgattccaagtgtccttaaaggttctgcccggtcttctcggcgccttgtgatagacagtcttaccaccgagtcccttgtcaatggcccatctttggttatcacagacctgtatttatttaagccgggttttagaatgagagaaaaggttatgaagaacagaaagtgggggacctggtcgggagacttacctcgtcaaagcccttgccatagctgcatgtgtaagtaacagaacagtcctcctgggcagttgtgctaaaagttgtcactgaatagtcaccaattgttgtaacggccgtcgccggcgcagcttcaatcgtcgtgatggtctttctaggaatgtctgtaactccggggccaacagctccctgaccgaacttggcagcagcatctgcgacgacaccatccgcaccggaccccttatcatgaacgatcacttcggttggtttgacgcacatgtcattgatttcctggtagtagttaaaactagactcagcaccccacatgttcgtgacatcagagccaatggcccacaccagtctagagcctgctcgaaaagtcagaaactaagaaggaacatctaccagattgaaggagagaaaaacgaaccaaatactgcgcctagcatgtcgataaaaccgagacacgtcgggtcttcggtagatgatgaaacgccgcgtttagcaattgatttctcattggaattcgacttttgagaaagccgggagcctcgcttggtcagaccatcttgcccgacgagattaagagaatcagtgtttgcataagacgatggaacgaagtctgaacagcagtatgactgtgatccgcctaaagagcaatttgggtcagcagtaagagcgaacaatcagctatttaacacttaccattgcatgttagattgtatatagctcccaagtccgagtcatcaacataggagttggctaagatttagagagttagagacccgaaatcaccataatcatcctacggttactctgattatatactcactattgatcgcaatgagatcggacccttcagggcaataacctgtaacacaaggcatgccaacaccacgccagccataccagtcgcatgtgcctgtgtttgtaccaggtacgcagcatagtgtttggacatcatcaccgctgcaggttgtgtccagtgagattccagtgacttgacccttggcataggtctcgggtatgaagccaacggtgcattcctgaccacagaacgaccagtaacatgaattgcgattattagcaaccgcttgagcccttgcttgaagtgccctgattttctcggcgtccgtggcagcgactccatttgttaccccaattcccaagaaatcattaccacttgtgtttgacgaactatcctgatcaagggaccagatcatgatgccaccaaggcagagttcattcgccgctttcaccttcatttgcacggtctcgccatcatcgtacgagacccattgatttgagtcccaagtgatccatttaacagcagcctcattatccatagttggtgtgagaccattgctcgaaatgatgcgttgaatctcggcattggatagcgtacccgcagacttggtacactctccagctgttccaccgtagctaaaaacgcagcccggcgtattgcacgaaggatctttcaatgtaaaagaccttccataccagccaagacctaaattcaacatggaaggatcgatagcgttacgccaaagtagatccaggccaagtcgaacctcagtcaggttggtatgaggcttcacgtatggcccagtgaacttactggtcgagtcccaaacaccgtggatatcgtatgacatgaagttgaaaaagttcaccgatttagccatagcttttagatcaaaccaacgcatataccaatatgaggagggaagtgtcacactaataccatactggcctccaaatgcggatttcatatcactcaagaggagtgagaaattgtcagtgtcagcctcaactccacctcgatcctccgccgcggggtactaggtccggacagtcagccttgatttatctgatagagaacaattcgaggttttctgatagcgacttacctcccagtcaatgtccacgccatcaaagccataggtcctcatgaattgcatcagcgatgtaataaaagctttccgattagttgcggtggatgacatgtcactaaacgctgtttgcgtatttggcgaatttgtatcatcctaaaatccgatgagagattggctaataaatgtgagtcatattgacttacattgaaggcccagccaccgatagaaacccacgtctgtaaagatctagattcggtcatgagtcaaaaatacataagatggtcagtttggtgtgtcgggttcgcactcacggatttttctgtttgagggaagtgaactgcggataaaggtcgggatctccagcatccattggaatgatctcaaaactggtggggtggaagtagacaaaggcttttcgagcggaagttagacatctgtagcgatagaaaccgaagaactaatcgcgctatttaccgaaatttacatgagtcaaggcagtaacatccaggtcggatgggtatcgaatatcacagggtcgctgtgtcgccctagaacgtaatattagtataaatgagagatatctgggactttgagagatataaagggcatatctgcgtaccagctctcgtagtatccaattctccttttggttgcgcttgaccctgagcaagaaggctccttcacagcgccacaacttccgaacccagtctgacatttatcactacagaaatcctgaaggcagtatcagtaagatcgccgacacccttcggtaatagaaagcagacttacatcggtagttccgcagaatccaaactcagagcaacaaacgttcaaggggcaggaaaccgagcctccctctgaatactcgccgcattcagctttggcatcgcagttactgaggcaaacgtccgatccacactcatcaggagaataaccgcatacgccggtctttgacaagggttagctaggtggccatatactaaaacgaagacagttcagactgactcacattgctgcagcatgcgccattagagcatggtgttcctggtgcacaggtgccggttggtaatccattgtctgctcgcttgtgaaggctggagtcagaagaatttactggcagtagtgccctgaccattggatttgccgttcttccggtaacattctggtaacgaggtgttgactcttcatgcacttcaaacctggccttgtagatactactgccattctgtacttggcttgtagcacccgtcgtcaattgggataccagaagaagcccggctaggaacagggacgacttcaagccctgcatcatgaatgaaaaatctgaattgattttgagtggccttacagtaaatactgcctgggaataaagtataaaagatatacaaatgattgtcggaggagtctgcctccgagctgtggagacagaagatccatccaatttaacgaatacgaacgaaatttcgtccgatcgaatgtaaccaacccctgaaactttctaccaaaaatacaaactacgaagccatagtgtatatgggtggcggactctcggaaggtctgtgtagtacgagggtactatgtcaactagaattcattgccggttgtcgttggtccctaaaaaccctcgtagtccgtattttttgtatgttgtatgttgtagaaaattttcaggggctggttagtgcttgatttgagacatggagttgagctactactgcacgctaggaccatccggaacctcattttctggcggggccgtggccaccgtactatctcagagtttgaactaggaggatacggaacgcccggacgcccgacttcaatctcaaactcatttcgctgattaagtaaatgcattatacataactgtaaccgtcatgtgacctccgtgctgaggtacgaccagctagcttaagaatacatatcattagttatcttcccctaggctttcaggcctacaatctagattgttggtttgccgaacctaaaacaattatagctagagagaggcgaagctaagaccaagcttcacttggcgatagtgggttccatttccaccattctagtactagtggattttgggggccaaagcatagtgctttcggaattttatgaatattttggataaaagcccgactacaaagaccccttatttcgagatatgagatcaacaagaagaagagtgcattccaccgtacgactaagagaaagcatgctatcaaagttcggtttgattaccctcgggcttagtactactgtccatgctgggttcagggtctatgatggctttcctagtcaattgattcaagttgcttatggactcacggatcagtgtctgcaagctttgtgagactttctctatctataaatacacaatggtatttcagcggctgaacaaagaccagaaacacgacaattctttgcgacaaagctacagctagtaacgcaggtggaggaccggatagtgtgtgtgagtgttgtcttctgtcttgagtttgtgtttattttttttcagaaaattttctctgattttctttatgcttgaagattggacagaaaccaatttgaccaccctatgtacgactgaatgcagcaattcgctctcatcgtggtactccacggttgaggctaattgtgaaggtcagacggtctacagtaaaggcacgtatatgctcgcacaaacagtacctgcaatgtggaagagcgggcaaaatatggtatgcttgcaggacaggtaagtctgctcgcttggggcaacttcaacagctataactgacatggtactcggaacagcgcatctgactggtgctttttggagtcacagaaatggatcggtagtgactatgtccggtgagcttactataagccacctagaactacacgaataactcacaattagctaactagatggtcaccactcgcctgctacaatgaggatcaatcggctatcccagtacagtgctctgaccccacttggtctgttactgaaatcactgatgggatgaaagatgtcactcgtctttataacagcagcctggtactatcagattttctaggaaagaatcggcccttactgacaatgagaagctttgtagtgaatgctttatcaaaatttggcgccagcgtctgatgtcacccctactaccggacggtgcacatactcagtatctcctggaccagtatcagaatattcaacggaattgctcaacaaccttgccagtcactacctatggtacaactcttttggttacagctactaccactgtgactgcatccacacccgcggggacggtcaccgcaacagcgacttcgactacatgtatgggtcaactagtgcagccgtttgacacttatcgaccctgtttcaacatatctgacacttacaatgtcagcaccggggctgtcgtccgtgcgactaataacgagttctgtgaatatgattctcctatatgtctgcctcccccctgtgagattgatactgtgtggtataatcctacttggttagtatgattcttacccccaaaagaaaaagacacttgacgtgcatttgctgacgaaggagtcagtgaggaacttgcgcaaaaatactcaacggccagcaataatatcaccttgactcagttccttacttggaatgccaacattttaggatcctgtggattcttgaatgacgcgcagagaatttgcaaaaggtctggatgaaagcagataccacctttcttgcttggttatgctgactgatagatatggtttagtccgccaggaggacacttctctcccactggagttgtgtacgccccaactgcggctggctcctactattcaaccggtaagtctcgcatgctatataagccttcacaccatatatttttttataaatatctgatcgggatctctcttccacagcgaccgctgcagaaccaacacaatcgggaactaccgcgagttgtgggttgttctataatgttgtttcaggggatacagtgagtttgcggcgaccgcttcattatcatcatcctgctaattgttatagtgtaactctgtcgcacttcgtttgtatgcaaatggcactctcttggtttgatatagagattaatcctaatattagtggcataacattcgacgagcttcaaaacttgaatacctttgtgagtttttgtgatgaagtttctcttcggttttatctactaactaattcacttagttatggaataactgcaccaatctttggctggataattccatttgtgtcgcccccgtgacgacagcatctacatcgacaaacggagcctgtggtcctgcaaatggaaacacggtttgtgagggaacagacaggtatctcaactcattcatggtttgttcttatcgataactaacatttacggctttaatccattagttgctgttcgatcaatggctattgcggagccacatctgattactgcagtgcaggtaactgtatttccggggcctgtgagaccaccgtcgcaaccacgaacggtacctgtggtccttcttgggggggtactacttgcacaaatccaagctttgggtcgtaagtcgcccgctatcctaatttcaaaatgcacctcccagactaacatatctatagctgctgctcaatctatggctattgtggaagtgggtcggattactgcggtccaggaaaatgctactctggtaagtgcgatggtgcagacggtggattgagtatcaatggagaatgtggccctagctttataggtaacaagacctgtgttggcacgcaatttggcgattgctgctctactgctggttattgtggaagcacagaggattactgtggtaccggaaattgctatgccggtgcctgtctttgaaccttgttagtattcatagatcaataaagattgatctaagaatgtaacagccttcagtaggggtcctgaaccagttttattgccatagtaattaatacttagagcaaaatctcgatttatgtgcacttgaaatactctagatcttccatgctcttaagcatttcagaataggcccccgcttttcctacgatttgcatacttgcttgcttattgctgtttgtaactgtttgctagattgctaagcgagaaggttcgatgtttgcaatgtttgcaaatggtcagctatatcaacaggctgcttcccactttccaacttgcttctttcttcatcctcgttattttgtattgaatgtactcttctatcattgcaagaaatcgcatgccaagctgagagtatctaccacgggtgcagtgaaattccaattccacacttggtgaaacataccaatcaacaagctccacgttggaccctgcaataaaactctacttcctgatacagcttagcgttatagacaccctcggcccttgggcatatttatccagcaaagtcttcgctagtttgcaaaatccctcatttcggtgtccggggtattctatcctactgctagctgcactaatgccggagtcccaatttgacccggcactttctgccgagtttcacaacaaaattttggaacatgcatggacaggggccggaaatgacttggttacattgccttccactacttggtggcaaagttccgctcccgtcgaaattgattcccgtctggttccgaatctgtcctcgttcctacgcctggcgaaggtagttaattctacccggccgggaccaggctctggtctctacttgttttattttttgcgcggtttacaggaacaaacgcgtttttttgattcctcaaccctcaaaacatggggtgatcgttttgtttggttatatccggctaccggggcggtcgatattgaggaagttggtatcatgtttgtgattgacttatcctattaatattttactatttcattctaactataagttagcttcgatcagagtacagaacttgcagctttttttcccgactgggaaagtctaatttgcgattgcgagaaatcatggcaatggagacctctacaggatatccttgcagtataccttcagatgatcgaagatagaaaggtatatacgtcttcaataccttcgaaattcttcccatggaatcttcaaaatttcaccaagtgtgatatcgaaaaagcagtggccgcttttattcgacttatcgacgctattgagcaaaaacttcctacatcgtcatcgccccagacccagatagatcttttatatcctaccacagtcctcgataaggcttatataaaagaggatacttttctccgatcatttcttctcgctcttccgcgtcgatatctttcgttccgatatatcgctcctgggattcaactccaatcgctgtcagatatgacagatcagccttttcctaagtttttctctgatttaagtgataggatcgactataacgagaaggatacaattcctctacttctattcaggggtgagggagagagtatatccccttgggttggaccctggttccctgacggggaaccaaggtctatccctgctggcctttatatagaagatattcataaggatatagcgcaagactatggcaatcagtgtaagctacttttaccttttggtatcggtgcgaatggctatgcacgaagtagtaacggcctactacttggttattcttcgaatcctcctctacttaccgatgaagccgatcagctatatcaaattatctactactctgggcttctccctggatggagtcatggccagttcttggataagatattgacgagctgggcagagcgtgttgagttgggtgattgggtagtcacggaggatggcgtttctggagggatggaaaagtttaaggaggctgatacgtctcttcattgggagaagtactatactgcgatgtgttggtgatggcatgttgaaatgcaggttggctttccaaccgttttgggctcactttctgcactctgtgacgatctaccgacttgtgcctgccgacttgcgtacctgccgccacaacctggaacctcggccctcgcacctgccaagttcgcaccttatggtcgttctttcccgaatcggaagcgaggtgttttgcatggtttgcaacgagggaccgcacaaaaccgagtcgaagggatctgtagattgttttcctttctctttcttccttgtacttagaatcttgaatgaattgcactcctttcgaactggcatgtaacacactcaacttattgttgtatacggtccaatattattggaaccctcacaacataagcgagtttcccctttatgtatttaaggcctgcgaccattaacttgtagaccttgagacttttatacattccaattgcataccatacacttggcaagttggatcattcccttcttataatactctggttacatgcagtatccccctttgactaatgcgaccccccccccccccccccccccctcgcccccccccccccccccnnnnnnnnnnnnnnnnnnnnnnnnnnnnnnnnnnnnnnnnnnnnnnnnnnnnnnnnnnnnnnnnnnnnnnnnnnnnnnnnnnnnnnnnnnnnnnnnnnnnnnnnnnnnnnnnnnnnnnnnnnnnnnnnnnnnnnnnnnnnnnnnnnnnnnnnnnnnnnnnnnnnnnnnnnnnnnnnnnnnnnnnnnnnnnnnnnnnnnnnnnnnnnnnnnnnnnnnnnnnnnnnnnnnnnnnnnnnnnnnnnnnnnnnnnnnnnnnnnnnnnnnnnnnnnnnnnnnnnnnnnnnnnnnnnnnnnnnnnnnnnnnnnnnnnnnnnnnnnnnnnnnnnnnnnnnnnnnnnnnnnnnnnnnnnnnnnnnnnnnnnnnnnnnnnnnnnnnnnnnnnnnnnnnnnnnnnnnnnnnnnnnnnnnnnnnnnnncaaagccccccccccccccccccggctgcctgattttcatctcacctcaccgccctccatacaatttgtataggggattggtaatataaccccccttgaaataacccttcctgcctgaattatcgggcattatctatcaccgccttcctaatcaggtaccacatttcctacgctacctgctcaggtctaccactccgccttcttaggaaacccaggtacctgcactttgtatgtaagcccctaacaaaattaagtcgctctagatcaaagagattaattgttatgtgccaattcaaatcagaagaaagagtgcattttgaataagattctaaacgtagagaaagaaaggaaaagagaataaaatgcatgttattttactatatactactccataaagtttaaccatatggtagtctattttttctgccggttggattattctgccaaagttagccgatgacatttcaccgcattatttcttatgattttggagcccataggataaaaccccctggtcagatatgcactcacgaggttatgatttaattgcttcgcttcgctccgcaatcaagggattaaaacatgtaggtgtgagataaaatacgcgtttttttcgatcaaaatgtagggtttttaaaagtgtagaattaagtttagcagaattgaattgatgaacgcacccccttgcatacctccgaaggagaatctgatacactcacaagaagctgtcctcccaacgagttgtgccattgaatgtggaatgggttagttaaagatgctatcaatcattgccatgactatgttgttgtatgttccaattgactctgtgatatcgcagccaaaatagatatatttcccataatcaacagagtaccaggacccaagcccacataccacagcacgaactctcagaaagaccaataggaggaattgccgagcgttcacattccacatggttcagctcggcagcgaatcaaggccataccgtgcctttctgaacagagggatgaaacccctagaatctcggatagattgtgagccaaccaaaaccgcccaagggaggaaggcagaagaaactgcaatgatcctgtggagcagaaaagcgagaattgcatacactgaagttcaacatcgtgttcctgtttattcccctccgacacgcccatccgccaacatctgcgacaaccaaccggtccagctccagctccagccattcattttggtcttaattttggagacctgcacacactcctttaatccactgtctctaaaatcgactttcatttcggatattcaagtctcataaccctacgcgacgtggccagtcgttctacaatactattcatctactctatatttttcataccatcgcgacacaacatatacgaagagcaaaaaatcagcaacaatgcacctcacaactctcctcacgggccttgtatcccttctgtccatcgccactgccatcccaatggcaagcgagacaccaacttctacaacctccgtgggaaagtccctcatctcgccctcgagctctgcctcggcttcacccaccccctcgcccaacccttacgaggcttacacatgtcctccgggtaagttcaagtcttgctgcatgtctgtgcagcagacgggcaaggacattgtcaagtcgcttggcgagttagtgccagttctcggtggggtgcaagttagctcggctatagctttccagtgtatgttcctctctgtctctttaaatagccccgaaagcttgatcaatttatactaatccaatgtgccttcgcaggcaagaacatgactgaaatagaggctcctgatacctgcaccgggaaaggttataaccccatgtgctgcaatacccagaatgatgtatgtatctcatcctccgtttaattttcttgttctataagagaatttatctgactatccttttcttttagggtacctccttcaacacctgcaagcctttcgaggatgtgaagagggcttattattcgaaccagatgaaggatgttccagagtcacaggctgatatgatcatggacattctcacttaatgtcaaccatctggctagcccggaactctgtggcatggactgagcgccggataaactcttggggttgcatactgctaatcgaggagagagaaaaattgtgtctgtttgtttctttttacttctactcgatattatatggtcactttccttttgatagtttggttcatggagattacagtgtgtactgtacgctgttattttctacgttctattcatccccgcaggctctgtatacataactttagattgcttcatctaataagagcccgaatctcaccagattggattccatagctgtttatatatattatcctatctctacgcaaaatcagacatagccgagatatcaagttttctcctggaggtttcttcgtctgacacatctgacatatatggtcggttctcattgccatggtatatcgtcctgatatgtagttgtgtcaattaaaatatgtatacatgtactctgtggtactctgtggtagctactctgcttggtacctggaggaatagtaaaggtcacgtgcgataaagcttcgataagctcctaacatgaaattggagatctgcccacctggttctctcaacagatctatcgtgagatcgctgaccacgatggcgactcatggtgctgttatcctcaaggctgcatttgcagcttgtctcttacgcccggatcctacttcggttcctcgagatgagataaccgcgttccacatctcccttgagcgcgcgttgtcgcattgctccccagccaatattcaggtctgagccgttgtcaccgttgttaactgccaagtcccagcttactaaatacctacagacctgtaaagcctggttgcttcgatttgtcgcattttcatctaatagggtcgggggtctagtcaattacctggaagctcttgctgcgtctttctcaccatcccagcccactggatccaaactttcacccaagcgccaacgcctccacctactgtatttgatcaatgatctgttacatcattgcaagttccacctggacagcccttcaaccttctccacagtgagcgggtccctgcagctacatctcgtgaaattggtcggctacgcagcgagctgtgatcgccaaaagaacccacggcaccatcgacggctagatgagctgctagatatctggtctgagcaggaatattttcatgccgagttagtcgacaagcttcgggaagttgtggttatggggttgccgataagttccaacgatgcggccaacgaactaaacccagccaagaagcccggcaagaatgtgccctttgtcatgccatctacacacggagatccatcgacgcgctggcacgaagttcgtgcaggcaacatttatgcccacattattcccgactcgactatacccattcgacctgatgacacgaaaccgatacagttactagcaggtcctgccgatgcaaattcggtgggagccctcaaagcttttctcggtgatgtgaaccagctcttcgatccggaaacctctggggatgatagacatgcagacatcgaccagctgggccagacagtgatccggggtgagaacacaggcgacattctcgacggcgaacactaccacggatggtccctggaattctgtcaacccgcagatacagacaccgagcactcgcgcggccggagtcgcagccatagtggatcacgaactaataacaagcgccggcgctacagcgacagctctatcagccagtccgagtcacaatctccgagtggatcacgaccatacaaacatggtttccgtcgccacgaggcacgatcaagaagccgttctccacagcgctcacgaagccgcgaaagctcatacacacctcgggagccgtccacttcacacttcccgccacctcaccatcctcaacatcccccacccaccaactcctttccccctacccatatccctggacagtatgcccatcccatgggtcccaacaccggttatccccaagtacctgcacccaactacggttcttggcctccgcctcctccgcatatgccgaccatgcccttccccccacctggacccgggccctcttcgtcagccttccctcctccgtactatcctccaccttctatgccgcagggacagaaccaaggacagaaccagggacagcagcaggggtacgggatatctccgggtcagtatcacttccctcctccttattctgggggtcagcagggtggacccccggctcggcgccnnnnnnnnnnnnnnnnnnnnnnnnnnnnnnnnnnnnnnnnnnnnnnnnnnnnnnnnnnnnnnnnnnnnnnnnnnnnnnnnnnnnnnnnnnnnnnnnnnnnnnnnnnnnnnnnnnnnnnnnnnnnnnnnnnnnnnnnnnnnnnnnnnnnnnnnnnnnnnnnnnnnnnnnnnnnnnnnnnnnnnnnnnnnntggggaggagctcctccccagggcggccgtggctggcaataaacatgtgcacccctgaacatgctcgaaatgcaatcgattccaatgaactgagtcggtggaaaggcgacagccttccatgctgtggttgtcacaattacggccacaccgcagtgggtgtacttattataaactagataattgttgctgcatttcgagtatataagaccatattttactgttgaatattagctaggcttaacagttgtctatcagtttaccagatttccgatcttcagagtagagtctcggaagtgaattcccgtctatagccattttcccgcagttaacgcgtgaagtctattacggcgacctgcatgccacactaaaaaagattccccacacattttgcgacttgaaaccccgcgatggcgtatggcaatccgatatgagatggccattctattcggaggtgccgatcagccgttgcctaaagcatctgatcacggatgaggaatcccatcgaggatcaggccatagtcctgccccgcagtgtccggatcatttgcgcggttgtatggcctgactgctatgctaatcttcagcgttactttagttatataaagtctcttctatctttaaccctattttcttttcttcatatcctgtctacaccctgtctactctcaaaccaaaccaaatcaaaccaaactaaaccaaccaccatgtcttccatactcgccgcccaaattgtccgcccctccatccgccacttctcagcccaccgccctcgtcccgattcgcgcgctgcccgcgctgtcgccatgggttgcattatctccggcgtggtacttccatttgtcccccctgctttggaaagttcacgtcaacggagcttgggcatgtctacgagcgccaagtaagtcttgaatttctgccacgtacttttgcgagttggtgtggagaaactaacctgacatccaggaaccccccactttgcttccacgcgcgctagtcgccgcactcctgactcgcaactttgacaaggactgtcggtgcaggcgctgatacaggacactgcctccgagattgcgaatgtgatgcattatgccccaggagtttggaattggcgttttgaatttgctttttgactagcacaagggatggtgctattattatacattattactattgaagagagagggagtggagatggcttgatttctctctatcgctgcgactagcaaggatcattgcatagctaactttgcgcgaatggatccattactgaattgactcgagctcgagtacgtagtacgagaaacgaaccaaatgtagcccaaagtagatcgagtccgaggaaccccctcacctccttattatctatccactttgttccacactcctctattttcagttggcgacggagtgatccgtgtcaaaatagtatacaaggcggccagccgatcagctaaaccggttcccactcggaggccgatacggctgttccgtttcgtatttccccttctccatgacgcgatcgaccgccgtcatgggttcatgccgggtaggcgctggatcgtgagaagcttcagtacttggagaggcggcatcgtcggcatcatcggagttcttgaatcgtcccttactcgctcgcttcgagctagtgtcgttggccgggggcggtgtcgacgcttgtgctttgcgcttatgctcgttctccatttgcttcatttgggccttgcgcttgatttcggcttcaaatcgggattgtcggtcggcgttgatcgattgcttggcgaaatagtaggctccgccgccggctacgggggatggttagttttttacatgggaatctctgggattgtcactggtccttggccagagatggatcgatatcacataccaaggcaaagggtgccccagcccatcctgtttaggtgagatcatcagtaattacgttccggtttgtttggattttcttctttcagatagtgaaatcttcgctcaccaggtagatcgaacctagagatgacatattagtaagggtaaagaggcattgggtagaggtactcaccgtattcatggtgaatgctttggtggtgatatgtgaagcagcagaaaaaggatctctacgtcaggcccgaggtcgggcggctacccgtggacgcccggacgagctcaccgcccggcctgatgactgtaatcggtgcctcaggccaagggttatcaaccatcgcatcgtctttggagaacgcgattaaagacgacctttgtcttgatcttcttctccatcgtatatatactgtcactctagttgatatcccactgtctttcacccactcctttcaccaaccctatcctgttattttacaataaaccggagaacctcacttcgccgcctgttcatccggcgcagtatcgttccatgctggcgtgaaataccttttaactggggcgtcgctccgcctcactggtgactcactccctgagctactattgatcagaattctcacgctgtttgtttcctgaacaaagtccaaacatgcctcccaaacgcaaagcagccgacagtaagtcctggtacacatctccgaagtattgatggctgattatatccagctggtcggtctagcggtgcttcaaagcgggctacgccggtccccgatatttccagcgacgatgactactcggaccaggaagagttgccagatgaaaccaacttgaaaggtacagtgtggcagtctgctcacctgaagtgaaccagagactaaaatttgaccataaagcggtcgtcaacaagttctctctcgaggcgttcagcaagaagaatcatgcggagaagacggacccccgatttggatacaaggatctttcttcgctcccgctgaagcgcgaccactacaaccggccgttatggatcgagcctttgaaaggcacaatcacactcgagagtttctccccgctggcaccccaggcgcaagatttcctgaccaccattgcggaaccgctttcccgtccgacccatctccacgaatatcggttgaccggacacagtttgtatgccgcggtctcggtcggtctcaaaccgcaggatattgttgagttcttggaccgtctgtcgaaaacaccgctgccggaaagcattcggacgttcatcatcgagttcacaaagtcctacggaaagatcaagatggtgttgagacataatcgatactatgtggaaacgacagatcctgaaatgcttcagcggttgctgaaagatgaagtgatcggtccccagagaatggataataccgaaggaattatcgaacgggctgctccgaaaatgggtggtcttgtcattcctggaacgaaagatgcagctggtgtacgagagaccactcaacaggaggctgccgcggccgtagctagagatgggaccgaagaaggaggggccgtgaactatggcattgacgacattggcgaagatgatacagaagaagcaaccacatacagtttcgaaatccccgctgctggtgtcgaagtggtcaaggcccgctgccaatcgatcggatgtcctgccctggaagagtacgatttccaaggagacacagtcaaccctaatctggatatggatttgaaacccgcggcgcggattcggtcttaccaggagaagagtttaagtaaaatgttcggtaacggacgagccaagagtggtatcattgtgcttccttgtggtgccggtaaaacccttgtgggtatcactgcggcggcgaccatcaagaaaggcactatcgtcctctgcaccagttccatgtctgtggttcagtggcgaaacgagttcttgcggtggacaaccatcgaccctggtgatattgccattttcacgtcggaccataaagaaaaattcaagcgatcaactggtattattgtgtccacatactcaatggtgtcacagactcgtgcccggtcctatgatgcccagaagatgatggactggcttcaatcgagagaatggggtatgatgattcttgatgaggtgcacgtcgtgccggcatcgatgttccgaaaggtcacatctgcaattgccgcacagagtaagcttggtctcactgcaacactactacgtgaggatgacaagatcaaggatttgaatttcttgatcggaccgaagctctacgaagcaaactggatggaactggctgcacagggccacatcgccaaggtccaatgtgccgaggtgtggtgcccgatgacaactgagttctattctgagtatctgcgggaaagctcaaggaaacaggctctactatacatcatgaaccctcgcaagttccaagcgtgtcagttcctgatcgatttccacgagaagcgcggcgataagatcatcgtattctctgacaatgtctacgctctcgagcgatatgcactcaagctgaacaaggcttatatctatggcggaactcctcaaaatgagcgcatgcgtattctagagaacttccaacacaatgagcaggtcaacaccatcttcttgtcgaagattggtgatacctccctcgatctacccgaggccacttgtctgatccaaatttcgtctcattacggttcgcgtcgtcaggaggcacagcgcctgggacgaattctgcgagccaagcgccgaaacgacgagggcttcaatgcgttcttctactcgctcgtgtccaaggacactaatgagatggtctattcggccaaacgccaggcattcctaatcgatcagggttatgctttcaaggtcatcacccatctccaaggcatagacagctatgaaggactctcgtactcgacgccagcggaacgccgcgagctcctgcaagaagtcatgctgcagaacgagtcatccgccgacgtcgaacaggtcaatgatgatctgttctcgatgcgctccggcaagcgagtgacatctaagaaaggcggtgctaaacgcagcgctgccactcttagtggtctggctggtggtgatgatatggcctatatcgagtataacaagagcaggaacaagcagctcaaggataagggacatcacccgctgttcaagaagatggaacgagaccgacaacgccgcaagaaggagagggagaacgaagaataaaagctgaaatgcgctgctgtttttgctttcctttttcaggcgcgtagtttttgacctttcttcttgtatgcacccagaatgacagataccccaaataatcaccatcagtatatggtaaaaaatgaacggcaagttaaaaagatcatttgtgtcgtagaacaccctcgtccagaaactcttgtaatcctgaaataaatatgtcagcacgaccggtctagaaatcatcgccaggcctagggctgctgaccgtttcccatgacgttggtcgtcgcaacggaaaacccgaaatcgggcaatttctccgatttttgtgtttggagttaataattgtacgaccctgataggctccattggtgacttggatttcttatggcactgtctagatcaccctgacagttggacagctccaatcatcactagtatacacggaccggatggtttgagctatataaatgacatgcttccccgcgttcttcagtgtcacagacgtcatttctccaaatcaagacttataactacaaacaagtcttggcttctcttgcggaatagtattcgctgctattccagtttgcgtctaccatttcaaacagcctgctcgacttcgacgtcttcacctactctaccccttccgcgactcggcgcgcagtacagctcgtatagtcccaacaccgggaactttccccgcgttactccatccagaatggccactgctactaagatacatctgtcgccggcgacagactccggaatctacagcttcaatgtgagggaagacaccgcgcggacagtgagcgagctcttgcaggaagacctggaaatccaccatgtcttctttaataccgaacggttccatagtatgtacttcccaggcgaagccctcaccaagaatcctatctaatgcaaagacagatcacataccccacgagctccttactatctatgctcttggtgcatcaccggaggaggtcaagacttgctatgaccggaataagcgttatcagagacccgcccttccggcaaaccaagatattgtccagtctatgcatgatgtcgctaaattcaaggagtgctctgggaaggaagaaaattaccctcattacctagctttcttccagcaggagattgacgcaaaaggcgtcccagatgttctgaatgagtatttattcgctgaagatgagcgagcggagagtatgatgtgtcgtgtgtttgccggtaagtatatcttacagttgtactgggctatattatattgtatgttcctcgggctaattcattcaggcctcattcacccgttcatccaactcggtttcgggattgaattcaaccaacctgctattgtagcccaaggtcttgctcagatagcagtgcacgatgactggctgggtcgtgcctatttcctacccgcggagaagatggctggcggcatcggaaagccgggacagaagtcgctgttccagctcataaataagattcgggcagacaagacccttgttgagagtgttcagtggtctgacagtaataagatcaaagatggagtgctccacagagcgcctgagcagatgttgaagtatgcttctcaatttactgtatccaaggatcaggtgcatgggcggttagcggatatgaccaatacagtcggtaagtctagtcttggaagcgcttgcttgtgttatttgaatgatgcgagcgagaagctattgctgaattcatctcgtcagtctactataccagtgccgcccagcgtccgaccaaagaaatgtggcttgatttcttcttgatccattgtgtcaattcctctatcttcttttctaagattatcgaactccctttcatgactcagcgatccaaactgcgcatgctggaatggaagggacgaatcgagctgctgatgtatacttcgcgtggaacgccggatctcctcctggatgaggtggccaattatcccccgaaggacaactggtcacagctattcgcgcgtagcatcgcccatcccgatgacgatggacatctagccaagctggtgcgggctttggcgcacggccagaaagtctgccaggtatatgagagaacacatcccgagatgcggatcaagggaaatatgtggcttagcgttgggaatataggtgagtatcaaaatctccattacatatctgtcaccttacctaactgctcgacagccgttgactctactgtcgaggagggaggtagaccaatgtgggtccgttctactggattcgatgaagcatgggagtctcaacgggcgcatatctgagacgggcaacacgccttcttcatgaggatatttatttcattgtactttccactatcccccagaatgttaccatttaacgctaaattgatataaaacttccccatactttagaggttgaactatggttcccggctctagctgcagtggggctctaaccttggaatgacgccagcggctcaacgtgattgtgcttgtatagggtgcatatgtagtatgttcgaacggttttcaagctgaattgaaccggaatgggagaagaacggagagtatcatttcttgcaaaggccagacacaggaatagggagaatcgtgtgtagaaaacgaaagaacgaaggcaaaaacattggggatcacgtggtgtcaagtggggctccccaacatgtattcgattctgcatctcctcactttcccccccatcagtctaccgaggtagaatctattgttattctccgatcttaacataatcatgggcaacgaagacagcaaggacgcatcaacccagaagaactggactgatgatgagaccaacccgttcgttgccttccggcgctacgctgatgagcaggtctccaccatgctgcaatctatcacgggcctcccttcgatggtgacacagcctcaccacggccactgggatatatttgaggataatcacgactataagagtcggatggctcgtcaacgaaacagtgataatacgggcagcaacaactatccaacagaacgagacagcggaagtggttatccggatggagatgatctacgcaactatggaaagaatgcacgaccacgccaaccacgccaaccagagaacgatgatctgtggaagaaatggtctaatggaccatccgagctgtttggcctcgattctttcttcgaccggttcttcgaggaccgcttcttccctttcgcatcgcaactcctacactccggccagagccttctcctccgggatatgtttgaggacaccgaatctccaacctggccgattgggtatatcctgttcagcccatactcgcctctccatctggaacgtcaagcacagtaccaagcaaaccgtgagaagggcgttttctcttctatcatgtcgtctttgcatctcaactccgaccgtgacccctccgaaccacagtggcgagaagccttcgaggatttaatccgactcgagaacgacaaatcgatgctcgatcgtaatgccgtcaccgcaccagagtctggaaaggattggctacaagggcttattaaacgaggcagcttgggagataagtggaagtatgttcctggcagagatggccagccttggtcgggcattacgttctctagccgtgcaggcccagaacaggaccagtctcggtctcggtctctaccggagaaagagaaagaagccgtcgatacgaaggaggctgacagcgagctggagctgtatgagcgcttcttgcacgatattgaaaatcgcgaacgcgagttcttccgcggggtttccgaaagccctcttctgcgtctcctactcgaggaccgacggcgacaacaggaggaacttgagaaatacagacgcagcgctccaaaggtcgaagatgagcacagcagtgacgataatgagaattggatcgatcttgtgtctggcggaaacaagaaatcagttcctgaaacacccgaggatttgccgaccgagatccagaccaagccaacaccaaccgaagctgtctcggaaccagcgcagcctcgtatcatctctactataactcgaacggaacgtgtacagcttgctgatggctcggttcagagcaagatcgttaataccaggcgttttgcagatggccgagaggaaagtgacgagtctgttgaggtgtctcatccccagaaaggttccaagtctgactctgacacaccgaagaacggttggttctggaaagactaggactctgtttggacaatatctacgattttaaaatgaccttctctcatgtcttaactcttcagcgttcgttctctcaatctattcttttttatctctttcaatttgcttcccaacctgcttctcggctatgcatggaaaagtcaatcccatctagtttgatatctcttaggaaataatgcaagcatggcggctaccgtcggtcataattcaatttctctatgagactaatatcaagcaaatctaagccaagtacactaagcatcttcagaattttaaaacccactcgatctacgtctaatcagccttgacactcttcttccctcccttgccagtagtccaccccctagattcccagagtttgacgttatcttccatcttcttgtaagcccaagtaaacggcgggtctacacaaccaaagttagcacctgccacaaagccaataatgagaaaacatacaaaggaactgtctcaaatcatgacgattatcctcgggggagtactgctcagcgtggtagctaggcgtgagaacagtcatcttatgtctgttgatggagtagtagtagaagaagtggcgggtcttctcgtagatctcgcgcgggctgtactcgttgccccacatgcgaagcagcttttcgtacatagagtacgggcctagcttggagaccttcctcaagtacccgaaaacgcccagctgcacgtacgtaacgcccatgtcggcttcgtcggattgcacgtagtcgtgcgagatgggttccagctcggctgtgggtgttgcgtggatgaattcttcgaggatcgggaggtcgaagctttgaccggaccaggcgatgaatttcttaaggtcgactttgcttatggagccgatgggattgagctgttgttttggttagtctggtataaagtggggttgaacttgcgggaattgatgcttacgtcggcggagctggcatcgtacttggtgagatagcctcgcaaactatatgggtttagtcagtcaccagaaaggaaattagtgtatttatgtggcgtaccattctgtaatagcagttagtgaagatgctcaacaaggtgcaatattcgggtgagagacttaccatcaacgttagaggatgcaagaacgagcaagccaccacctccagggcgttgacgcacagtcggcaataaagaggcaaacagatatgagagaaccattctcatccgagcctgcacattctgaagcgcggcattctctgcgaaagatccaccgtgcattttgaaacgaggctggaagttagtgataacagtaaagagattcatgatagaagtgaccacagtatcgaaattgaagtcaatgtggtaagacccaatatcggaggccagccgagacgctctgtctcgtgtctctttgcctgagttttgggtgcccatgtagctggtatggaagatagacctagagaaattggttaatgttgccccagactagataattttggcctaaagaatgatcacttggaaaacttacttgcaaatttcttggctggtggtaggaagccaatctgagtcttctggcttcgcacacaaccggcggacatctttgatgacctgctggttcccttggcgcactgctttgagcacttcgcgagtcatggagtgcacaatgattgccgtggcacagctgtcaataccaccgctcagagggaggaagaaaccggcggctccagatctccgaaggtaatcccatagccagcaggcaggccccagagcaatctcctcctcggcaggatggtaccgcggatggataggcagagcaggcgcgaggttaggttcggcatcttcatcccggtgagacagcctgatatcaagatcaaggcggacaaagggcgattgcttgctggcttgcattccacggcttgcgctgcaccggtaggtgcggacctcttcgatgtcgaccgttgcagtgacaacttccacatcgttcagagagaactgtgaaccttgggccacgatgtcaccgttgacgacaatcatagcacatccgtcatagtacagacgatcgccatcgcagccttgttgattggcgtaaagatagattccaccactctgtgagctgtaagaaaagtgctatgctattggagcgttgtttttcactcaccagtttggtagcctgggtgatcagattgacccgagtgttaagcttcttcagttcgtggtggctgcccgaagaattcgagatgatctcaacacctattttgaattagacaatgagcgcggccatggatattgatacttaccagctaggccatacgggatgtgagggctaaaatcgattgttagcatccacatccacttagagagttcaacacctacccattaggagtaaacagctcctcacacgtctcaagacccagacacgtatctcttgtgctgataacagcatcaccaaatggaaccttgtactggcctgtgatatctccaactattgattccaaatagtagtcatccacctcctgtggacgttgccatggcgtaaagtggcggtgctcgcgatagttgccatctagattagggattgatattagaaactattctccgaagtataaagagcaattgaacgaaccgttcgcaagccacatcttcggcctaatcaggataatcttccggttgtggaaaatgacacttgagaaaatatatcaactaatgctatatcagtaatatcgggaatacttaccgacagttgtagcgcacattgcgatggcgaaccggcaatcccacatcaaccacaatatcctggcaatcgggatggtcgatgatgcgggcgaacatttcccatgcgtgcatgaaggtgtcgccctcaaggaaaccatccagaactccatatccggtaatctcgagctccggtccaacacgcaaggtagcaccggcagccttggcttgcctgatgctctcaatgatacgctccgcgttgccctcgaagtcgagagcccactggttaagagagctagaacgggttagcgcgggacttcctagtatcaaaatagtgaatgtgtcagccttaccatgttgctagagtgactaggtgccccatgattcctaatatgactgagacgtctgtgtcttgtgctttgcacagaggctcaccggcgataagagccgaaagaatgaggtcacgtgtgtggggagctcagattcccccgcttctgtggtaattacatgactgtacattattgtaatctattcttctctcagcactgtcggcttaactccgaccaaaaaaacatgtaatcagtttgtaagcatcccgaggtcggctgctgattaatgcgatttctccgcctgtctgtgctggattccacgttttgatattttagatatagactcgttattgagtgagaattttcttcttgttcatatacttaccattttagacattccttgctggcgatttggctcttacagaatgagcacaactgccctgatccccgccccggctcatacgctcgcggattcaatgttgtcccgacactttggcaaagagacggttaattacttctccagtaaggatgtcttagactcttgtatatgaggcacagtagggctaaagtatctctaggttctccaatcaatcgtctatctttcttgcgctccgaccacccgttcctgtccagtgctctaaagcacccttcgacccgatttgtactgttgaacaacctagcgcccttgactccgtcaccgtcgcagctatactatgccaagtatgacgatgtacgcaagcttgttccccaggatatcttcgataaatccgaggaagacatgatcaagaactatgactcgcgcaagacacacccgacccttatattcctcggactggacgagagtcacaaggaagggggtctgacgtacaagatctactctggcacgccgtattttgcagtcgacgtgacccccaagggacctgaagagcagcagactgcagcgaaggatataatcgctgccatggaggcgaagggactgtcattcttccaaacacgagttgtcatgtccttctccgcagatgaaggtatgaagatgcgatcttaatgtctgcatctataagaggaaactaatcaactcgggatagctgctatctatgcacaagcacgtgcgctgatggactggaacactcgcaacaccttctgtggtacatgcggccaccgtactttggccgtgaatgcaggaaccaagcgtgcctgtccaccgacggatgttgcactaggaattgagggcaagttggaagagcggccggagtgcaatacccgtactacgctgtcaaacctttccttcccccgtaccgatccgactatcattgttgcggtggtctccgctgatggcaagcgggtcctcctcgggcgctccaagcgcttcccgccagggtggtattccaccttggctggattcatcgagccagcggagtcaatcgaggatgccgtgcggagagaggtgtgggaggaatccggcgtcactttgtcccgcgttgttatccactcctcgcagccttggccgtatccggccaatttgatgattggtgctattgcccaggtcagtgaccccgctcacgagaccatctctttactgcatgaccctgagttggaggatgcgcggtggtttgaaattgaggaggtgcaagaggcgctgcgcattggtacaagtgacttgagtggtccggctggtccagaatacaagggcggtttgcgattgccccctcctacggctattgccaatcagttgattcaggctgctgtcagcgcagagtattttgcggcagataagcagtctaagatgtaaactcatacttcttatgaccaccatatataacattgatgaatttagaccttgaccatgtctgaacaccggtagtatctatgtaaaagccctgttttgaattgaaaggctcacacggaatatatcctaattctaagtaaatatttgcttcgatgattccacaccttccaagctttcgaaattactatcatattgtatttgggaaaagacttcatgcatccatcatgagccgaaggaaaacaaatatgtttcatcaaacttccctttgacgatatcaacagcctattgatgagcattagaaaaacagttcactatgtgtggactgtcagcgggcttactatggcatctttgaattccatgacaattgcttcttcctcattgatgaggtcatcttctcgcacggtaatatggtctttatcgtatgtctccgctcgatcaaaatctagccaaacgactctctgcgtctgaactatccttgacgatcatcatgttccgtggttttgaatctcgatgtctcactagtactttatgtatttggcgaataccctttaggagattgttcacccgttgcggcgtgtaatctcgcaagttgatcatccccagactggtgatgtactcgaggaatatagcgctaggcgggtattcgtcgtcgagaaacttccttaagtgaggctggcataggctagggtcaaacttcctcataaaacctaggaagtctggcacaattccacgatcacaaagtccttgctctttcagccgagtgtaggtagtggcttcaagtacgtgaatatccaatccacgaccttcctgttcgtaatagcgccgcggtcccctcccatggtgctacttatattagcaagaatatctagatgcatagtaccttgttgctcgacttaccaccttcatgatgcaagtttattgccggatctcaacgaaaaatatgactgaacatcatcaagctccggcatggtctcaggtagaaatctgtttttttttgaaggtagttggagttgtttgcagagagcattacagggaattgtaggtgacttggccccagtattatgcacgccccagcgtttgatgcgctaactcagaagcaccaatcactccacactcttatccatctggcaagtggttgctaagtatcaaaatcaaagatatctactattcacttgatttgctgtagctcttgcagattgatgtttaccctatctgaaacaaaaaactccttctaggaaagattgtatattgtatattctaccttcttacggttctcggatgggcgctctagcgattcgcagaggaaatgatatgatcatttcttgatgttgaggaagggatgcgcgattaattgacgagcggttttcctctcctctgggagccaggtaagcattccacggacaaaagacagaaaagaatctcgctcattctcttctagagatgggagtgtagcttctagacttcgggcaggaatcaagtcatcgtagaggaattttcctaggcatattagcgaaaaggaagacaaatttcacttgtatgattaactacaaaccttcgtcactgaagaaaggtccatcaaagtattctcgtgcattgctgcaggaaataccggcttcattactgataggatgaggccaattgtgttgtgccatggcattttccttcgcaattaatttctccggaggaggaccgagaagcgcgatcatttccgctagatgtgacttggagtcgtatcgaccatccgtattatggacttgctgaaatagctctgtgcattcaataatattccacatctgatttgagggataagccttgttcgtgatactcagacagagaaagaatcgggggagacgttaccatgacaccaaaattccaaatatctgccttagaatcccaaccacagccaagaattacctccggtgcacggtagtggtcaggctgtatgggatatatgccagtttggtcccctccggcctctttttttcggagaatcatagcttagacgtgtcgataatccaaagtcagctattttgggtaccatattcttaaggtttgtccaatcaagagccccaaaatcattgtggcagcggtaaacggtacgaccggtcattatgtcgactttgtattgcataggtacttcgttgatctgtagtttaacaaatgcggaaagaacactttccttttcaaaactcataagaatattatctagtttcaaatctaagatgatttcattaaattagttctttatatcataaaaaatggaaaggaaatggtactcaccagtatgaacgactccacaatcagaatgaagaaagtcgaggccaaccaggaggaaaaatatgtaagcttttacgatcggtagagggagtctccgatcaacgaaacgtcgttgtagaatccagagaggctcgcgcattggtttataggctaagcataggtggtttccttctgtagtagccacctcgaaactctccagacaggttcgcacgatggcgcggccgcgatgagatggattctgccgtgtaatgtgctcctcaatgtctctttcatggtaaggctcgcgatcacggcaggagtcaattatttttagggcgactgttcgttctgactgccatcgaagtcttcatcaattagttatgtgataagagggcaaaagtggaacggcaagagatagattagcgtaccttgtgatatctcgagctagccagactgttgatcgagttccccaaccaatcttcaccagtaattgataatgactagcaagaatgtccccggggtttgccgagtaaaagtgattggggctgtatccgggacagatctcctcatccaccgcttcatgctgtggaatggggagtgcggacctggaaggcagatgccagatcggctttctcgcgagggagaagattgtgcgcttcgccaattgattcattgtttctagagataaattgagagacgttcacatctcatcaagacgtgctgcgaataggaccttgatatatactgggccaaggatatctgcacctgcctagttagttaacttggtggctggcaagttgtgatgactaatcaggttattttcttggaaggttccactctgagagagttaaggtgtgctccactaaatgtctatattgtggattctctacggagtaggtacgctccgaggatgatcatatttaactacggagtagtatatgtctcttagttacaaatccatttactccagccaatcatgcaacttgttactcgactgtgattttcggagtttttgggatgatcctagttatcaaaggaaggacacggggttgggcagagatttaagggaacgttgggaagagagcacgtgaatcgttgatcccactaccccgtcaacagtgggacattcctaatttgtactacatacagcatagacagtaggtatgtcgctttgaagtttaggcatctgaactggtctggcggggaggagtccttaaagatcatgcatcatgcatcttgcactgctgtgattactcgactccatgtatgcagaaactgccgtaattttgcttcatgggcccgagtttacgagactgcgtgaatttgaatacacaggcgggctctccaaggtgtgatcttcaataaacggcggagtacccccgaagccatttgcatcatgaaaaaatgccacatctttattgatcctttcgcgtgttcccggatgaggtttgtaagcaactttcctgcggctgagatgggccacgacgactggcagtttgttctgttcggcaagatggcccagtgtgggatcataataattgttggatatatcgaatatgaaaagtgtgcagactcgccatttctgtatcgctaacagccttgtatccggtgtatcgtcttcttgcgcatcgtaatctgcgtattttcgctgcttttctagtgaggatataatgaaatagaatgcagaggaagtttgagaaatatatacccaccgctttcgcttctcataccgctttggtagtggtatgagacgtatacatttgacgacgcggtgtaacaaacttccaagagcacatacagttgcctgaaggtttcgaggagcctacctgggtaggtgttccgactctgctgattcttgcaaagtctgaagcaggccccactgttcagccgcatttcagccctcccagttgagcctcatcccgtaccagcaaatgaacctgtagtgtccgacatagcagatcaagaaaacaaactaaataacaaggaaaccatctatatagaagtttatcctttatctagtaggtactagccatggccttttgcgggcttctagtcgcgatcacaacgagaatgtcgctgctgcaatgtcaatggctattcgggatatggcgtcatcttcagacctcgctactacgactggccaggcaagaacgaacagaacacacgtttccatctattggcagtaagtcataattattccggtaccggtaaggctattgggacttgtcacattatcagaaccacttggaaaacccagaaagctatgattccccctttaaagaatgagattttgccacatgatgatcggaacgagaaagccaagagatagagaacgggggtggaagactgcgaatcccttgatcgttcatatgtattcttttgttttactcggtaggtacaggtgaattgtaacagagacaccacacaagaatcaagattttaagacgaccatttcaaatattggcatacaacgtgccatcccgtaattcgtgaacactgctgttccgactgtttggggacccgacctccgtataacgagtgccatcacgcagctcatggatcgtgattcttcgagtgctcttgcgcttgcgctgcgagcctcgcttagaatctggggtccctgactcacttcgcacttgactgcctggtgtcatatcgcgctcctctctgtctctctcaatagctgcctggagcatatggtccgcaaccctagccgagccaatttcatcgtaccatcgacgtaagccagacgcgtacgcacgttcctgcgagtcatattcgacaggaggtccgttcgtctcggcctcgggacccgaaccgtcgaatactgcccacgcgctagtatcggcactgacaagcatcatggtgtgatcgaaactctggaccttgaagtcgcgtaagagtatggcgttgccttctaccaatgttggcatcgaggccttgtggcgccggaaaatttgagcatgaagagtcatgccagccatagatggatcggtaagttcaatagtcacgaaccagtcttttgaactagatttggcccgggttatcggcgaagcttcatgtacgattgagatggtatcgactagagcattgtaatgatcaatgagtgtagcaagtggtgcgaagtaggaaagctcgctccgcagtccagaagcattacggtcgggaactgagggctgtggaatgggaactgccaatgtgttcggagattcaatcacaacatccatagagcggccaggttcgggtgttgctgtgggttctgcggcttcaacggattccgaaggagccacggcatcatcatgtctgtcaacgtggatctcttgtgtgttttttatgagtcccgccccgataccatcgtcttggtctgactctggggagtcagccagcagcaaagttttatcaagaccagtaggggcttcagtttcttcgatcgtggatgaagcttgatgttcaaaatcatgaatcagttcaagcggggatgcatttttctgggtggggtctgatgttgagggttgtcgcttcaatggagacgtagtggacggcgagactcgaccgccaagtggctcaggtccttcaacagttggctcttcgacagtcggctcatgcttcaacgggaaatcggctatggtatttctagcagacgaaggaatatgcaaatcaaattgtccgtccccagtgagatactgcccagcatgatttttgccttccaaggatggaccttgatgatgagattcaggcccatcaagcaagtttggatcagcattgcctgattgcccctcgttatagtctcgatcgactggcactcctatctgtgcgtgagggttggccacagcataatattcgtcgttgtcagcttcttcgatgagctccgcatgtttaatttgtttatcttcatcttgctcaaggttgggtgatgccacttcagatgcacggtccgtttcatagtggtcttgggacgactcatcatcatccatatcactttcgtaaactcggtcatattgttgattgtattcgtcttccccctcttcctcgtcttccctgtcttccctgtcttccctcgcttccctgtcttcgctttctccgccgtattcactcctttcaatgtcttcgctctcttcactgtcttcgctttggcgttcatcagtatcggaatcgtcttccactactccgtgatagtcttttccgtcaagataccacggctctggatattcctgtacaccacttgcaaattcggctgcagctggagggacagcgggatgttcggatttagagcagtatgagtgatcgtttcgttctgctgactgcgaagctgaggctaccggatgattggaggcagactcatcatcactgtcactgtccagcacgattacttcatggcttcccgcctgcgagggcagcttttgttcctgctcaggcttttcaccactagattcaacgacaccgaagtcatcttcgtccaatcgtgattccaaactaggatcaccatataaatcctcctcgtcctcttcggattcacattgagaatcgtaattttccactgactccgcatagtacacttcttcatccttttcttcacggtatccttgactgggtggacgatcgacatccttttcgctttctttctcctcttctgtatttttcatcttttggtattcctcatctcgagcggctatcatttttccgagggcatcgatcgcatcctgatcagacgtgaaccctagttgtggatagtggactaagtgagtctctggctcaggatgtttctcatcacgagattcacccggatattgaggagatcccaaattgtcgctggcagtttcgatgccaagatcatgttgagcaatatctgatccatcgacctcttctgaggattcgagtgattcatcttgcccatcctccgaaggtgaggatgatcctgagttatcgcgccataggtgactggaatcaacgagatgttcttgatatgtttcatctgacgcctgagcttcgtcggcgacattttcggtaacaacatcagcttgagcggcaggtgattcatctttggtattgggggagtcatccaatttatcttccgagtccgaaagtcgtgctggatggtcgtgggataggttaggatcatcaaaagcagaatactgctctagttcatttgacatttgagctttgtcgccagtagtatcaatggccatgtcagcttcgacgacatctgacccatcaatagctatggagtcgattatctcaactccctgcttctccggtaaatcttctgagcctggatatgatgccgaatcattgcggataaacccagcatcgaagacatgttcctgctggacggattcaacatccggatcaactgtttctagatctgcgtgaatggaatcgatggtgtcggtatcatgggtttcgatggaggatgctgcgggcgttgctatggtatccattcccgcctgagcatatccaatctcttggaattgtgtgggcgcggtccatggcaggaaatagctagttgagccagcatgatttgatacgagtggcgaaggaatcgggagccccggagaagggatgggtcgaatctgcggcgtatccgttggcagatggaaaagtgtttcatgatcatcaacttgtccatgagacacaacatttgactcggcggcatgtctttcgaggatactcccggtcaattcaagagaaggcttcgcaaacactggaagtggctcttgtggtgcatcctctgtgtatgttggagcttcgacatcatccgtcatggaagcctcactcgccgagtctgcctcgagttcttgatcgatagattgattcaaagcctgttcccaatccacaggagcttcttgctcgcgagggctttcgggttcattgacaacacgccaatcttccctgtgcaagctgtacctcggcttttttcttcctttccctggcacaaatccatcttcttccgtaaaaggatcgaaagcggaacggattgttcccccaagtggggttcgagtagaattgaggaacataggtgatccccagggccgttcactagaaggcaggtcgaattcgggattgattgatttgccactaggggttgtaggcgatgctggttcggtttcatgcggtgctgtcacttgcggctcaaccgatattatcaacggaggttgggaagatcggtagatctagataggcagcagttagtcaccataagacacatatcgagtttgggagcaacatacctcgagagatacgccattctcaaagtgcgcatcccatgcgacagacctccccggggttttctgggcgtcttcgttgctgacaaacttgatgtctttcaaggccagactaacggtatccccaattccgacatgcgattccgcgaccctttctgcgacgcgtccgtggaacgtgaccttgatttgtcctctggcgcccctcaggcggaagtccggctccgctaatagaaggctcacagtcttgatcgaagaggagtatggccacacaagtgctacagctgcaagaaaagacttctcggccaatttctcaaggtctggggaaagctgagctatcgggaccctggtcaactgcgccagcgcattcgacgcgggagactgctcaatcgcgttcattgcgccggtttgcccacgcccgactgacttttgttttatcaagctggcctcatatcaaacaggagtaatagtcgatataaaataagaagggtaaaaatgcgagtatataaaactgggctgaaaggaaatgaagatgaatatttcgtgcaacaaagaggaccttcggcagctgcagctctgttgggtaatgttacagtaaaaacagcaagaaaagggcgtaatttcggtattgggagaacgaaagttaccctcttcggttggattgtccatgtccaataagacttgctgattggtcgatcttattatatagtcacatacggaggattatgcactgcttttgaacgtgaacatagtgaaaacattcttgtagtgtattcttcatgtcgttatgggtctacgctataagacaccggatataaaaagcagctccactatggcgaaagcgcttggcatcctccaaggtcacttcttttttctcgcaactcaccttcgcatttctgactacataggttaccaggaattcccaagagctcgttgaaagcatgtcaatcacaaatactattcggcgagtggctgtcatcggcgcggggccctccggccttgctgcagtcaagtaagcggggttgttacacatccgccaacatgacaatgctgaccgactcagatacctgctcgccgagaaatatttcgatcaaatcgaagtcttcgagcaaagaagctccgtaggaggagtttggaactacagtccgagctcctctaaagaagggagatcaacagctgtcccacatttaaccccccatgagccagtcgagaagccagtgtggatcgatcacaatggggggcgtgaggcaacattcgtgtctccagtatacgatcgactggaaaccaacatccctaaggagttaatgcgctactcggataaggccttcccattggaatcccagctcttccccaagcatcggacggtgaaacaatacctcgaagaatatggcgaagacgtcaaaggcctcattcactttgagacacaagtcttagaagtgaaactcaaggatgaaagtctgagcacttggagtctaacatcaaagagtcttcaaactggcatagacacaacccacacatatgatgctgtggtggttgcaagcggtcatttcacggtcccttacatacctgacatcctaggaatacaagcctgggatgcatcatacccaggtgctatctctcattccaagttttacaactccccagaacctttccaaggaaagaaagttgtggtggttggaagttctgcttcgggcctggacattggttcccagatcaatgaagtaagccaaggcaagctgttggtctcccaacgatctgaatcatacttggctgcatccgcaaatgacgataaaatcatctgcccggagatagtcgagtttcttccttcgacaacctatgacagaggtataaaatttgcggatggtcgcatcgaggaacatgttgacgctgttgtcttctgcaccggctatttctattcatatcctttcctatcctcactcaacccaccggttgtgacccacggatggcgaacaatgaatgtctaccagcagttattctatatagagcaccccactctcgtcttccccgtgctttcgcagcgggtgattccattccctatggctgagaaccacgctgctgtcttctctcgtgtatggtctgcgcggcttacgcttccaccaaaagatgagatgaaggcatgggaagcttccgaaattgaagccaaaggagatggaaaggatttccatttgcttccatttcccatggatgctgactacctcaattttctctacgactgggcggagaaggccaacccacgacctggcctctctaacaacggacaaggcaaacttggtactcggtggggtgagcgggaaagatggatgcgggcccatttcccagaaatcagacgtgctttcgtacaacggggtgacgcacggagcgagatcaaggatctagcggagctcggtttcgactttgaagagtggaagaggcaacaagatgatcagtgatgattatggtacaatttcacatctcaaccagtacctacagcattaacggtgatctaaatcaattagaaatccattagttttgcatcttttgaatcattaaatagatatatgagcctataacccttgatcagcatgtcactattcccaaatattgtagatctaccgataagcgttatcacgtgaagcgggctcactatccgtccgcccgtcgcgccatgcgtttaccctctttcatataccgtcacagtgctttggggaagtggtagatgttgcccagaattaaaaattgtatgtgtctcggatcaatgcagctcatatgagcttatattgagtattgaacctacgctctcatttcaccccgtcatgttatccaacatctccccgacactaatcgcccgcacatgatgcttcgggagcagcttcgctcgccgaaactccaaagtcaccacagaaagaatactgaccggccttcagctacaattgtggttattagcgacagcagtgagagcagcgacggtagtgacttggacgacgaggagtggcctatcaagtgtatcctccgtgaaacagacaccgagtatctcattgattgggagggtccatacgatccgacttgggtgagttcccgtggcaatattggacataaaaggcatcaaagaaatgattgccgagcttgaactaacaaatgcgcgctttgcttgtttaggaacccaaagagaacgcaagtgagcttgctatacgggtctggaacaagcaaaaagctcggcgatcaagtgcgctagataggaagtcgacaagtaggaggattactcaatcgcccagcgtcgtcgaagtctcttcctcatcatcagaagagaacacaggccaaggggacagctaccgcactaccttcgacgagactgaggacactgattctgataatcattcaagagcttcctcgtcgctatttgtgcaacaagacaacatttcagagatagtagactctcttcaatctcagtacattgaagtctcgggctgcttttacgggaccgcctctctacctcaatctccatctacaaaccctcgcctgcaagccgacgaatacatccctgagtcacctattccacctgaatacccgcaacgaggtgagtgggacgacgtcaatacgcagcagcctggcccggtttgtgaccaaaaggccgatttaattaatagatgctcatcgcatcgacagtactctgcggaaatcaacaacgtttctgaattattatcacacccgaacacgccgggtgttggactgagctccaacgtctccgaaatagccgagacgcctgttcagccatcaagtttaggaaccgatttctcgtgccccggctcctatcctttttataataccccatctcacaacaatttgacttttggctcgtgtggctccatcctgagaggtagtttcacatgcaaaatcaagttttacattttgttcacattttgctcacattctcacagactgcgtgttcgtccggtcaacttatctgagctcaattccggaaacagtctgtcaaaacctgtcacagcacccagaagagctcagtgctgaaggtttcacccgaccaatgccatcattttctaatctcgtacaagaagaaccatttggcgaaatcatggaagacaaagagcccaagccatcagatccttctctctccgctgccactttggaccgatacggacaattgccagggtccactcccacggaaatgatacggaacgcctgggctaaactcagcgaagcgaatcaatcagagctatcgcaaccagctaacgctgtccaaactccgtcttctgtgggggatgttgaagcttcgatgcctgtgtctatccccgaaacaactgctctgcttagcgtcagacccgacacagactctttttccaattcccatactgcagtccaccatggtcattctgaacctttactaccaccctcggaactagcgcacgaagctcatatgagccaaccttcacttcaaactattcatcccagtgcgttgaccgtcaccgacatggatgaggtggttgcgcccggttctgtccaccttgggccatctgaatttgctgtccctcttccgatgaatgcacgtgtgaaggatcactacgagcgagtactatcagatgcagctacatgcatacgcaaattttttgatagctttcagtcgaatactcaagtttcggagcctgaggcaagtaggatgtttctgggatatgattcgcattgcttacattgttttcacagcgagaggttttgcattcacatatgcgggaggtcatcgcccggctgagcaatgttgcaacctatccagacttgaatttcgccaatcatttgaaaaataccgaccctgactttgcggaagaggcatcctgggcggaaatgtccagtgcaaagtttttcctacttggtcatttcatgaagattgtaggtacacacgagctccatctgattctcgctgtacaagacgagaagaaacagggagttctcgagcgttatctccaagggaaaggttttgcatacacccgaccccgtgcagagatgggtagcaccttggaggtttccctagccaaggggtcactgagctttggaattcattcgagtgagaccgcccgtgaactttacaagccgccgtctgctatttttgccctggattcgtatttcaaacccaaaagcccgttcatacagcatctccgaacgacttatgcccgaaacgggagcttgcttcccgtcatttggtttcttgtcgccaacactagtgaacatatcgagcgttgtttgcccgagtcgccggatcctgatcgattgcgtttacttgtgcactacattgcccgtttccatgacgaggccggtgagctccaggatgatgccctcggcgcgtctgaagatgccgaagagattcttggatatctcttggatagtgttgctggttggccattgcctaccattaaacctttgaaccttgtatcactggaggagttagagtgcgacagttcttcatctgacgaggcgatgccgccggcccataaacgcacactggtaattataccacatgttgatgtatttgaattcagctaacgctttggggcaggatgagaaacccgatgaacactcgtcgaagcgcgcacggattggtacccaagaggacagccagttgaccgagtcaactaagcctcccactcaaacgttggaccgtgatttgatctcattggagaagaatattatccagatgaaacacattcacgcaagtgaaaaagcccagctgcaggctgagcttgctcgggcaaattctggattccgagaaatggagagagctctgggtattctacaacaccgttacgagagtcggacgaaggaactccatgtaactcgccaagagcgtgatcgtgtggttgagcacaagccgtctctagaacagcgcgtcgagaaacaaaaagagactatctctagtctgaaacaagaacgggcagagctgaagcgcgagctcgacgaagctagacaggcactcaaaaatggcggtggcagtaatgctgaactagagatggcacgggaggaaatccgtcgtctgaccaaagaaaattcgaaccttgagcgcaaagctgagtttgagaaaaaccaatccgagtacacccgagagcaataccaaactgcgtctaccgcggccgctcagtctggcacagaaaaccgccatttggccactgagaatgagagactaaagcgcaaggccgaaagcaatgccgtgcaacttcgtgagttgcacatgaaggatgagtcggttcgccatctagctaggattgaagagctagaactaactctggcttcgcgcgacgaattcctacaaaggaaggaagaagagcttcgtgaaatccggaagaatcgtccgtcaactcgctcgactagcactcaaccacgaagccccaagtgggcgggcagccgtccgaccagccccggggttggtcataatggtaacggtaatggcggtcatgggggcaggggcagtgcgctacgatacagctcagaggtgcctttctgagggtattacacaatatcccataaactttcatgtcccctgccattgatcatgttcttgccactcatttttcctacaccaatctatgacgtctatacacgatacatagacgggggatttgctctttgcgaagcatttcactatcacattagctagatatttattcctttcatccgctcattacgacattgcatcttcctggcgtttcatccattgcgactccacatttacccatgagcgattttcgttttgcgagagaaaaccgggtcttggatgcaacattatctgagtcttgtcatctccaagcaagtcaactgtttcatccgattttcatggtagttcttttcgccatagatctaatgacagacatcttagtgctttagtttttttgagaaaataaagacgattcttccaaatgtaaaacatcaatctggatttcgtattcggtaattaaaatgtaagcaaaaagtagcaaagggccgcaaaattatggattatgtatacactgagataataagacagggaaggaaagaaatactttgtcctggacagcagcatacaaaatggacagataagtagaagagaaaagagcccatgtctaaatctcctggaaatagacatgtcacagtccccgaatgcaatacgtttacgccgaagccatagagttagcaatgaatgtagccagctccttggccttctcgccacgagtcatagtgaaatgattggcatcctccataacggtaattccgccgacatgattcgggccgacgagggtatcccaaccatttggaccgagatcagtgcggttgttcaacaaccagagcatctcacgagggtctgggctaccatctgcagctggtgcagggcgggcatcacctggcttggagcagacaccatccttggcccagaccatgaaggtcttggggagcttatcggccagcttggggtctgtgtgagggaagggaaccgccttgtaagcatccagggaatcgatgaaagccaggaagtgagggagaagccatttaggtggaggtgccttgccctctccaaacagtccgaccgtatcaaagaagctgtacaggcggcgaggcagcttctccagtccaacggggaagggcgaatcaagaagcagcaggcgctcgactcgctcgccttcctcgaagatcagttggcgcgcggcgtcgtacgcacaaataccaccggcggaccagccaccgaagttgtaagggccagtgggctggcggcgccgaatctcagcaatgtaaggagctgtgagctcgtccaatctggccttgagattctcaggggtgcgcatgtatgggcagttcagtccatagacacacacatcgggagaaattccagggatggaagcataggaggtagcagagccagagccatcagggaacaaaaacaaactctgagtcgctgtctttgggtttccttgcaggaggattgaagtggccggcgggtgctggggggtagtgctgggagcgaccaccggggctcgaacagggatttgttcggggaatctgattggctccgcaggggctggcttaggctttagacccaaggtagtctcgatatcatcgagtgtttgattctcaatgaagaactctcccgagagatcaagatcaagatcttcacggattttaccgagaacggtgagcgacatcaatgagtctaggcccatctcagcaaggttcgcatccccatcgagctcctcgggttccacaccgatctcctcggccaagattgaggcaatctgcctcatgctgtcattttgctcctgcgatccatgtgccatcggcttctcatttgcaggacttggcagaccactgctgtttggagtcgacaagtcggtcgaagatgcggccgacgacatgtcaccttcactgcttgatccgtcactactttcactagggctcatttgagctagaagatttttgaagtctttgacagttggattatccacgaagatagtggagtcaagatcgagtcccatgtcctcgcggtatcgcccagtgacagtcagcgagagaagggagtcaactccgtaatcagcgaagttgaggtcatcagtcagctcagatgccgaaagtccgacctcttcagcaaggattgcaagagcacgcatagtcagacttggcattccagatcttggtgaaggggcagcctttttggcagagccagtctttgccttctcgatattgacgggagcaggaacacgcttggcggccggcttggatgccgctccagctggaggaagagccatgtcgaggatctttcgtgccagagcttggaactatgtcgcattctgttagtgtttcattcgagaatactacgacggtttttcgacataccttaacaccaccaaacacagcaacgatgtcatctccatcaaacatatagacatcaccagcccaaatagactctttccagggttgcatcctcacgtaggtgcggtaagtgacgctcggatcgaacttcttcaagcacctcatcgagtcccatccatgattgacgaacacttggttcttcgaatcggtgttatcactagcattcataatgaagccagacaagtgaccaatgctgtcaatccagaatggattgcgatgaaagttgcccggaggagcctcaaatttgaccagagcggtagcttcgtgttggtcactgtcgaggatgacttcccgaatggatttgtagttctcgtcataatcaaccagagaagcaaagagcttgtagaccattcctcgcttcatgcggtgagcctggccggatacagtgctctcttggagatgctcaatgcttcgcttgatgaggtaagagctgcgcttccactcgacgtcgtaagtactgggatcaaagaacttgatgtagcaagtggcgtggtcaaggatcttcttcccctcgggggtcacagaccacacctgcaccttggcattttcttcggcccagtttgcagtcgctgaaacgcggaagagctgcttgcctccctttgcaataagcggcttagggaccaccatgttgcagacatcaaatccgcgatctttccattctggcttgtagttctggactagatattcaccaagtgtttgggcgatatcggcgtacagggactaaaaatcaattagcaagcaagactgttaaatgagaaaagaatatgcataccgatggagtaaggcaggcaccgttcaccttgtgacctgcaatgacacgattgaggtcgggatcagcaatgtcattctcgatgacgatagacgccgacgaattgtcaccactcgtctccaaaaccttttgtgctgccgatgacaagaaaacagaaactggcgcagcatcagccactgataccggcggtgcacccttgagcagacagaagttattagtgtaaggaatccagtagttcttgagatcccacttgtaggaagggagtgggagaactttgtgtccagtgaagtcctggtgatattccttccatcgaatgtcaattccagccatatagagagctgaaacactggttgagagaaccttccacgtgtcttcctggcgacggagagatgccacagtagttgcctgaggaccgaaagttgccttgaccattccggagcagaccgggtgagagccaatctcaacccaaatagtcttgtcattcattaagttggagtgccgggtagcttcaagagcacccaggaagttgacagtctcccggcagtgacgggtgaggtagttggtaccaagcaactcaccgttggtctcattgatgacgtctccaagaagggcagatacgaatggaatagagggcgcgttgaaattgacgccctttccaatttcagccagactttcaagtataggttcaacctgagctgaatggaaagcaaaaggtacatttaacttggtagccttgaacccttcgttggtaagagtttgcgcaagctcgtcaatcttctcgcttgcgccactgataacagtctcgctgggcgcattgatacaagccacctcggtagcctcatcaagaaactgcttgacctgtgccactgaagacttgacagcaagcatagcgtgcgttccaacctcgatttgttcagtgagaagctgggctcgtcgcccggcaaggtagattgtgtcgctagttgtcaagacaccggaagcattcagcgcggcaaactcgccgaggctatggccaatgacaaaggtaggtacaatacccagagacatccagtactttgtcaatgccatttgcacacaggttgttccgagctgtgtaacgatcgggctatgctcttcaattggcacactcccgtcgaccagggacagaatagatgggaagccctggctctcacagatacaattcaagtgttcgatgtgagcacggaattgggagcaactatcaaacaattggcgtcccatgcctgtgtactgagcaccttgtccggtgaagataaatccgatgccaggtgcattggcaggagccgggctgatgctgtctcggttgacgataggagccaatgcactcctgacttcatctagagtagatccagtgacagcgactctgaagggatgatgaatccgtctcgctgtagtcgtgtaagacagattggcaaggaggcttgcatcgttggaattgaacgagttcttgtttgtatcgatgtactgcacgagagcagagatgttattcttcagtgcagactgggaccgagccgaaacaagcacaggatgcgcagaccggatatcttccacattctcgtcattgagcggaccatcctcgaccatcaaagcagtattgcctccggcggccgagaaattgttgatgaaagtcttccgcttgccaccatttggcctgttccaggggacagcttcagatgcaatgtgcacattgcgctgcgggaagtctgtcgggaagttgtggttgatcttggtcttgatgccacagtgagggggaatcatgttctttcgcatcatcatcaagaccttgatcagagctgtgacaccagaggcggactctccatggccaacatttgactttgctgaaccgaggtgaagagattgggttggcccacgacggtagtcaggagcgaagacatcgagaaccgactgcatctccactgcatcacctgcctgggtgccggttccgtgcatttcgatataactaatctcttttgggtcgctgttggactcgttgagaagcttgtcgaagatgaaggactgtgctcccacatgaggccgagtaattgacacagcctctgctgagtggttggtataagctcctccaataataccgtagattggatcgttgtctgcctgggcatcctcaagtctcttaatgacaatggagccaactccatctgctctgcaatagccatcagccccatcatcaaaggtggtacagtttccggtccttgagaggaagtgtccacgatcaagaccagcatgattgtcgggatttgccaggatgttgacaccgcccgtcacggcagaatcacattcattcctccacaaggaattgcaggcgacatgaattgccgcaagacttgaggagcaagcggtatccacactaacactggggccgctgaacttgaaatagtagttgatgcgaccgggagtaaaagcacggttaccacccgggataaagtaggtgtcaatatcctgaccactgttggtctcacggtagtcatcactggtcattccatagaagacacccactcggttcttctgcgtagagggcgtgctgtcagggatgaagcctgccatttccaaagcctcataagcagtcaagagtgccagacgttgagcaggatctgcttgaagtgcttcacggggagacatattgaaaaatcgagggtcaaacatgcccgcgtcgtcataccagcatccatattggacttggctggtatttcttttctttccttccatgtcaacgtgagccttgacatcccatcgctctgggggaacctcgcggtggacgtccagtccttttttcaaaagatcccagaaagcttcggtatcaggcgaatctggaaatcttcctgaaagaccaataattgcaattttggactgctcagcacggccggtacgattatctccaccagcatccttccggacatcaccaagtgtgctgtcaacctcgagattggagactccagcctttttcaatgagttaaataggctctgggttgcagtgctggaaattgggaacagagtgcatgtttttgtagactccaagattgactggcaagattggatgaccttgccccagcaaagctgtctttgtagaatctcctgaagagaaaatctcaagagctgctcaaggctctcagcctggagctccttgcctgtctcacttgacagcacagggatctgaggcacgtacatcatgaaattctctgtaggccacgattccaaaattcggttaatgtccctgttatcatatagatgagaggcatgataagggccgtggattggaaccattgtgggcttgtgctcctttgagagactggactcaatgaaacggcccagaaaagtcgggggaccactgattgtgagtccattggggcttactgcgctgatataaggttgagaaacgcggggcaaggccttgaaaatattaacaatgatcctcttttatttcaagtcggtttgggggaaaagacttacattcttcttcgtgtactgttgaatcaaatcctgggcctcgggctcgtgcataccagaaattagtacagaccagcttgatgttgccgatttgcttggttctatgagctcttgtactttcaaaacgcacatcccgagcctcaaggaaacaaggacggtctcaattccagctgcaataagctccccgatagttttcgaagagcttacggccgcagatgcgagttgaccggtgcaaagtccaatgatgcagctgtcatcacccgacggataggcatggcccaaatcaccatagtagctataagacattgtcagtaagtttgattccaaaatctcatctcgatatcatcaaggcggcaatattcttactggatgaagcatcctagttggtaaattgttgtcaatgcactctctagagctgggttcggccctgactctttgaacctcgcgagaaggtcaacgatactagtaaagcgagggaagccctgacgttcggatggcggaagcgatgtaatttccttgcgtaacgcatagtagcacttttggaagaatgctgctacaagcgagtcattcttagcatgcaacagccgacgaagcccggagtcaaaatccgcagtctgatctccaaagagatacaaatgactggggccctccataatcttcctggtagcagattaatggtttcaaagatatatggaaaaagaagaaaggttcaggtcaggcgaaaacttaaggatatcatactttatagagtattttccattagtgggtcgtcagtggaagattgtaatagactgcctctcaattttcttagtagtatcgaaataggaaacataaggtttaggacccatactttttctgaatcaggatatagcaggatatacggtatggtaactcggctgaacccattgggaaatgtatgatcttagccgcatattctctagtattagcgagaattattattattggtatttctggtattgcgatgtatacatcctcaaagacaccaatggtaccgttactgcagtcgattccataacgccttcaaattgtcggtatgtttgtctgagcagagcctatgtggagatgggctggaccgaactagaatcttgtttccttggataatccgattggatcctgaattatcagtttgaattactaaagcaaccggcaaaccgatgatagtctacggatacccgtgtgctgtttgcggataaaacgagcaatgaccccagagcagagatcaggattttggacgggtatgtgagccgggatgtccgtgacaaatctatcatatgatagtagaatcatagactatagacccgtgctggagaaaaattactatgaagttgcaatcaaggagataatctcgctgcattcggaaggttacagccgctgcttccacgtatcacgtggttttatttgccctagattgatctccctgtttcttagactagaaattttaagtaataaaataatacatcaacgttcaatcgaagatcttagagaggcttgtttgcctaatgttctcaaaacagtaggggatcacataagtatagaagacccttcttcagcatggaatcatcaagatctagaatagtgcatgggatgtctcaaataagtaagaaaatgtagatcatctgcaggcatcatctgtaatgttttttcatacgtcacgactccagcttcaaaacttatcttctgagacattgagtcttgtttcatatggtcgcggcctggaagttttcactctcattcttacggtgccatctaggccatgaataagatattcaaataaaaatgttcaacaccttcgatatcagatactactcaattgacattctagaataaaccatagattacacacgtggctagtcggacgatccccatggcgatccagatgttctcaagcaatcaaatcattgattgacgacggaataagatctgccgataaatgaacgcaaacggactatcttctacaacaaacggagaacgatataaacaaatatagtaaaataaaactgtatggtatcctagctagtattatattacaagataaatgaaaataaaaaaagtatgagcacagttaacccaacgcttgtcatctttagcaggaatggaagaaaagcatagccacgccctcgcgatggagctcgtgctactgaggccgaaccgacctgagaaacatgccctctgcagctagtgtggggcactcgttacctaagcaacgcctctaccaccaagcctatagtttgaggttggagggatctagtcctcacactctgaggccacacataaataccgtcgagtagagcaacagccattccattggccatgtgagtctggatatggcagtgggagatgaagggtccagggttaacaacctggtaccgcactatcatccatgttggtccgttaggtccattagtaacgaaagtatctctcatttgggggttctctagttggaagagttcagggcattcagcataagcttcttcggtgctgaaccaattgaatatgccaggactaaaactaagaatgaaacccttgttagagtgcttgtgcattacatgcggggcttggatggcaggactgttgggcatttcacccaactagagcaacatatcgacccaggtcccatttttggtttgaatggtaacctgcggctctaggttgttcttcgcgttcatgtcatagagaatcgggtcgtcccagttagccatcatgtcgtacaaaccactacctgaagtagtccatgtgtaagacgagcccaaacggccaatggagaggttcaagttgattggtggctttagggatagtgacagcagggtgattcttgatagccttgttttccagagcaacaacaaaagcggaggtgtttcttccgccgtaatccacgtaaggttgagacgcggttgtgtcctgagaacccttgtatttcattgtagcaaacccagaaaatacctgattggcttgggtatctggaatggtgtattccttctaaggcttgtcaagcttgatcatcgcggcgtagcgctcaccgctgaagatgttaacactctcagcaaactgaggttcgatgtagctaccattagacgcggcacttacgaacttaagacccacccagccagcattaggatcaacttcaatagtctcgtgcaaaccgatggtggtagtacagccagaatcaaggccagctgaaatcttgtcctcgtatgtccattgttaatgaacttattgattccggagaaaagtatagtatatcaatggaatatgagggaatgagtaatcttgcctatcaatctcgacaataaagcttgcctgcgtggaccagggaagcagtatttgaatggtttgcattgtgattattatgataatcccaagcctcatgcttctggggctggatgatcctttgatagtagccgcaaacatgtttgcatttttgacaaattattgtttgtcgaatttgcatagtttggcaaagataggcagcatgggtgttcactagggaatgtccaggtggctggggaagctttgacctcaaacaatttccccttttaacccagactagaaggccgaggaatgcaaggtcattcctagtcaggatccaagataattcaaggggtgtctagggatccgaagcagtagactgtttgtgcgtggctagagattccgtggccgcggtgagaatgtggcaattcccgatccggcagcctattgtagaatgacatgggctatccaatttcccgattttggagttttaatgcataatataaagacttcaatagctctaattgcttgcttgcaattttcgttctgtctttgatttagttgcctcaagtgagtaagtgtgcggatggattaaagcgtctatgcgtagtcccttggaggactaaagcatagctattcagctcaagacataatactgtgtgggattttgtgtgattccgcggccgaaagaaagcttggaaggaaggaaagaggagcaatctaaaattactagtactgagcttatatatattgccagttgtctgagattctgcacaatcaacaagtcaacaagtcaacaagtcaacaagtcttcaatctttctattctacttggatactaagaaaatgcctccgctgagcatggagtagtaaactagatttcctagtctcagacttatctataactaataataagggttagtcctcgacagttctgttccaggttctcctagagatctaaatctaacaatccccgagtatctcacctttctaaggcagtcctcaggattattcatttgaatacagacccagcaggtgaaaataaagatccgccagggatcctctgttgtcgagtgtaccagggttgttcagtaccgaaccatggatcgggtacggctccggccttttcatagaagtcgcaacatctgggggtatatatcgaggtgctcgagtaatatgacaccgcagggcttgatttagagaaatccacacacataaatatagggagataacctccaggaagaggaatgacctttgaacgatcgggaaacaggagatattacataatctgcattaagcttatcgataagccagccctccgccgctagtctcgatcgggccacaaacaaacaaccccagtcccggtttacgccccaattgtcgtcttaggcctcaccgatttgaatcgctctaccttctcacgtcttagcaaccggttccttggatccatttggtgcagttcaatctttattcgctaatcctttttattttgaatacccaattaaaactccttattccgacaatgctgattgattgagcgatcattgctatccctgcggccgtgcggaccttgtcacctatccgaccaagctgtgttgtatcgggttcgaatcaacagcacaacctcatcgattgatacatcattttcctaccttcacctggacgtggacttgtcacaagtgcgccaggtgttgaaacagcctattaggtcgatcccgtgggttgcgctcgacgaaactgtgttcaagtaatcatcatggctcagctgccaatgcggtttccatgctggtgccgagcagtatattcatggggtggagagactacacgagatctgggatttgtggagggtgacttgatcgaatgcttgaatgcgggcgatggacaatggtggatggggcggttgcgccgtgacaggcgcgcggttggactgttcccgtcaaattttgtcgagctcctgggtgaagactttgtgcccgtaagccgcgatactactagtccaatggtgctagcgggatcttctccgatcaataatcccacatcagctcccaagaaacagaagaccgtttggcggaaacccttccaggcgcataaggaggccgtatcaccagcatctgtcgctcggcgcgcaaccgcaaccagcccagccgcacctgcgattcctcaaacaccacctcgggctggcggcatttcacgaagtaccaggccattgcgcacgcatgcgacagcagtcaggaaccaaggctcgctagctcgacccacatcatccacatcgcggccctcgtcacataacgtctcccctcgttcgtccgcagagcctgaacggtcaccatcaatgctgccgaggggaagcgtctcatccgctcgaccttcatcccgcgaccaacctccattacaatcgcaggaacgtccatatgcaaacacctcaaatggcagcctctcatctacccgtcgcaacccatcccctttgccaatacgcgaatattcgtctggaatcatcacacaaggcagtactcccctttatcgggcttcatctcgtgagccgtctccgttgcaaatgcaggattatgcgtcccaggccatgccacagggcattacttcatcttaccggggctcatcgcgtgagccatctccgttgcaaatgcaagaatatccgccccccaccatcccccctggcggtatctcatcctatcaggcacagtcgcgtgagccatcgccaatgtatatggaggatcatccagctgcgagtatgccatatggtagtatgccatcttatcgggctgcatcgccattacaaattcaagataattcgtctgcaatggtcccatacgggcgttacacatcttaccgggccccatcgcgcgggccgtccccgccgccaatgcacgagcattctacaatgagttcgcatggtggtatgtaccgggctccatcgcgtagccaatcaccactgtacatggaggatcatccacctgcaccagtgccgcatggaagtatgtcctcctaccgggctccatcgccattaccagcacgagaacatccatctgcactcgtctctggcgggggtatgtcatcttatcgggttccgtctcgtgagccgtctccggtgcaaatgcacgaagagcgggaagactctccccctccccctccgccgccgccacaccgagtcgttgtcggtcgttcgggctcacactctcctcagcctccaatacattctcaaacacgaagtcattcgccgctcccacctatgcactcatctcaagatcgcgcacactctcctaacccgccatcacactatccaaacccgtcacgatcccccacgccattagttatgaatgaccgttacacgacactcaatcgaaccccatctccatctgcggcctcaatgcactctgctctttctgcaacctcgggacaatccgatatgcatggaaatacgccatctccgctccgagatgccatggaagatgttatgacttcactggaagacatgggtctcccacgccaagaccagtcgccctctccgtccccggtgttcaacgagccctggtccccagaagagtttgatacctctcaggaaaggaccccccaggggaacagacgccgggatttaacctcaatgggcttcgaaggagacaaagaacaactgcagggcggactcgtccatcgaaacagcgtttatagccatgaccacatggatggtccacctcaactgaacaattatgttcaaaggatggagagccgcctacgtcagctggaagatcaaaatcgatcgtctgaggatcgaacaggcggtcaggatgacaacggacctcctccccctcccccaaaacatgccacctaccacccgcggaataattctataccaggacaatacgctcccctcaagacccggcgttccggccatgatctccgcggtgatattctcaaccggacatttaccaataagtctagtaccaccaattcgtccagtggaatgcaaagcaatggcacatccatgacaacgagcacagacaaaactggtcaaagtgtgatgagtgggttttccgcagggggattcagtgcgacgagtgcggggagctttgctagacgaggcgggagtgagaggccaaatacagctatggacactgtccgctctcgaggatacagtgatgcccgcccggaaacgccattcactggtgtttcctatcattccagtcataactcctctcgccaaggtgcatcatcggctattccgtggacttccaccggcctggactcgacggatcatagcggagtttttggcggtctttcgacgccaaaaagcaaaaagcaaggctttttcaaaaagatatttgaaacagccaagactggtgcagccagcgcaaggagtagcatttcggtcgggtcaaattctccaaccaagagtaacagagggatagacgccgtgtcaccggctccgtctcactcgcaccgtaatagtggtcgtgacatgggacttggaactaacgccattgactgggtgcaggtgcgccgtgatgttaaccgagcgtcgtctcctagccgaaatgaaaggattgatagggcagaacgatgccagatgatggaccaccctgttatctactccgtggaagagctgtatgataccgcagagggcgatgaaagcattgatgggcagccgatcactgagccaacgaatttccacgctgccaatcttaccctcgttgataagagtgcacgctttatcagcagtctacctccaatgacgaaccccatgagcctcgcccaagcctatatttgtcgaccatacaagagtgatgttcagcgtctccgggccatctttacctgggtcagcgagaaaatatcgtgggaggaacctctcgacggcgtcgaggttgacatgaagagacttctgcaggccaaacgaggtaccccagaggaaatctcagtattggtgcatgagatgtgcacagccgttggcctgcatacagaagtcatccgaggattcctcaagagccccggcgacgcccttgacctggaaagtctctcccgccccaaccactggtggaactctgttctggtagacggcgaatggcgctttatggattgcgcacttgcaaatcccacaaatcctctgcgcagtaaattcatttccaacaactcctccatatcggagagctggtacttcctcacacgcccgcttgatctctgctacactcatgtcccactctatccggaagaacagcacatctgcccgccaatttcaccagatgttctgctctccctgcccaccgtgtgcccgccattcttcaaacttaatatccagatgccggattatgacacgagtttcctccgcatcgacggattggaagtcatgcaactgcgcatgatagtacctccggatgttgaatgtgctgccgaagtcgaagccccgggattcgcccgcgacgtagatggcgacgtgttcgaaagcggagacattgtgcgcaagcgcgccttggtccagccggattggatccgcggccaaaagcgcatcacaatcaaggctgtgctgccaggcgacgaaggccagggtgtactgaaaatttatgccggcaagaaagggctaatgcactccagccgggacatccctcatcccctagccttagccctaccaatgacccacacgggagagaatccaccttacgactttgtgctgcgccatcccacaccccacgcccagcgacacgacttgtacatcatgcagccacagtgctctcgcctggcagttaacaatacgtttgtgtttgctgtccgccaacacgcttctgctccagcgtccgccatggacgagagcacttccattggccgcgcctcaccgtccatctttaatcgtccggccagtgcgttgagcatggtgtccagcaccacagccggtggctcaacggtatcgggcgcctctaacgagttctcggcgtcgacttcggtcatttcctcgggcagatctacttcggggcgggacaaggctgcgaaattagcgatccaatctccgtccggcaaaattcttcgtcttacccgtaaagctgaacacatgatcagcagtgataatggcaaccaatctatcagcgatgctgtcgccgaaggcagtgtttgggagactgtcatcaagatcggtgagcgtggtatgtggcgcggtctcgtactagctgaccgagctgcgcgctggtgtgtattttgcgagtgggaatgtgtttgattttttactgttacatattatgggcgtttatcttgaagccttctgatacaccgggttcagaagcaggtggctctctgtgtttttttttcttttggcttttttgcgttgtgatattgcgggttgcatatttttggcatattgtcctcctggcatactagcatttgcatgaggttagcttggggcattgcatttgcatccgatctgtccagaatctatttcaaaaatctggatttcggtgttagagtctaaattaataatagtttgagaaacccaagtccgcataagtaatctatagcataattcaaaatgatatgggaactggctaacaggctaaatagacatctgacatctagtcacaattcttcgacatatttcatttataatttagctaccgccgcgcgcagcaatggagcaacttgcttcctactcccagccgcattggtttgcacccacagctgcctccagtggagggaatcctcgtccacgttcaatgtagaaagacaatcgcctgtcagctcagggatatcctccccatcgagcggagaccattctacaagcccaagatggtgagaggattgctcaataaacctctccacacccttgacagccgcttcattgccacccgtcacgatgacgaatagctcgcgacaaaacttgtcgtcagtgcccgtgaacgccgtcatgataacaagcacatccaagtctttctcagcagaagccgcgaacgagagcgcagcatcaaggaacttctccgggccacctgccttctgaacaagccatcgtatgggcttgacggcagaacagaagcccattttcacagtctcccccgaggactgtgacgtctcaatccagtctttataatcgcggttcaatatttcctccatcgtaagaagatcgagactattcagctttgcatgaagaatgctcttgtagaacgtttccagctcccaattgccttctgaattcgctgcagcttgtgattctccctcgatttgagatcgcaggaattcgaccgcctcacgatctacatcggtcactttgccttccgcggtgagatttaaagtatcaatcagcaccgccgaaagagcaagcttcgcaacctgtgtcatttccggggtcgtgtcccaaagtttccgttgtcgcaactctcgcgtgatgagcgatgcacatgacccaggtcccggttggataatcatcggctgcccttctggtaagccgtcaatgcttggcatgttgtgctcgtcgatgtggtggtcgatacatcctacagtccggaaggagacacccggcaacccagttaggaacccagagcccttatcggtctttgatggccgcgggaacgcgttccagtctaccagcgttgcatcggcgagtatctggtgccacacatgctggtcttcgagagactgcgcgaagtccgcgacggtcataacatactcgggtagaaaattgcccgcagactgaagggtgttctcgaattgctcttcactcttcagaggggggaaattggttgatgaccataatgcagccgagaattccggtcttagtcgatacagctctgtcccagcggggaaattggacaggtttagtagtgggatatggggtcgtgggctttggatcggaagccggttgttcgcgcagtaagagtagatgatcgccgagacgatagagtcaaggtcggcagagggattgccgattacatagattggaggctcggttagagcacccgagaggaagtgaaggtgcacttggcgggcttggcgtaagaactggaggagagtcatggttgttgaatcaattgatcgtagccgatatccccgcgaacagatatccgacgtcattcattcaattgctgacacatcggatatcggattgttgccttaaacacaaggccaaacaatataaattggaaatcgcgacatcctaacttgacaacaccaaaaaccatgcttagaacaatgtctctcccgatacagctgccagaggcgttcaccaaaatcccacgctataatattttatactctactccctctcccatccaccccttatcctcaattgcacccccaagactctccccgcaccaccccctcatcaccatccacgccaaacgagaagaccactcctccccactagcctgcgcaggcaacaaatatcgcaagctagaatacatagtcccagacattctatctcaaacacccctccatcacagccatgagaacaacccaacacccccaggcccgcagcaaggcggtgcagcaacaaccctcgtaacagagggcgcaatccaaagcaaccacactgtgcaagttgtcgctctcgcacggaaactcggcctgaaggctgtaattcttctgcaccgcggcacaggcggcggacttgcagcagccagcgacaaggaagccttccaacacagcggaaacgtgcaaatcaatcaccttctcggtgccgacgttcgcgtctgcgaagaaggggatccgctagcgcatgatgcgacgcctcttctcgatgagttgagggcgtccggacagaatccgtattggatccctggtggcgcgagcttgcatccgcttggtgggctggggtatgcgcgcgcggcctttgagattgctgcacaggaggaggagatggggcttggaggttcggggaggtttgattacatctttgttgcgtgtggaagtgggagtacggttggtgggttggtggctgggtttaagctgctagacaagataaggggattagatgtgtcgaggaaggttgtcgggattcttaattcgccaactaagccgcgcgcatatcatgaaaagcgcgtgcttaattttgcgcggagggcgggagagttgattgggcttgatggggagcgggatattgggattgaggatgtgcggcttgatgatcgctttgttgggactgcatacggcgtgctcgatgataagagtaaagagactctagagaatatggcacggatggagggtatggtgctcgatcctgtttatacagccaaggttgcgagaggcatgatgcattgggtggacgagggagaagttgtagattctgctaaacccttagagcaggtcaatatattgttcattcatacaggtggacaggctgctctaggggcttatgtggatgttaaataatacatatcaataagatatatagtacagtcggaaacgtgagtaagaatggctgaattcaactagtattacacggtgacggtagcagcaaagaaaaccagtcatgacagacataagtcttgtggtatggaaaagcagaaaagcgtgaaatcgctggaaaacacccccggactcgccagtcccttctcttgtacacccttttttgaagattgatccgagcagaacgatagaagtataggagaggcaggtaaacaaaggactaaaagcgacgcagtaaagcaatcagaatatagttaaaaaaaaccgaacgagacgtggtcaagttttgaataagaacaaaagattcattgggaaaaaagtaagaagaatcagtcaaagttcttcgtcctcaaggccaccattagtgccgtcgagtttgggcccaccctgcggaccaccgttttcgccattttgaatcgaatcctcttgaacagaggcagcacgactactgtcattactgaccacgagggcctccagggcctcattagcatgggtattctccatgggctgggtctcagcttcagggtcaatctcttggttggtcaggtctgcaaatacatcatctaggttctgacgagggctgctgctcgcgaactggggatcatgaccgaagcgtggagggctgaatagggagggttccaggtcaggctgaggaggaggagagcgtggtaggaatgagggggattgagaagcggctgcatgcgggaggaaagccgaggaggaggtaggtgcaaaagcaggcgtggaatcgctcgcgggtaatgaatagtttgcggagaatgggtatggtgcagcattcggatctgccatctgagccaacgttggacctgtgccaggaggttgtccgctactagaagtcggtggtggtggttgcatgggtgcggattgaccaggagctgcctgtgattgagcatcaacagatttccttttggtaacgccaatgtgcttggggcgaagatgctccgggagatcctctggacgattgactccaagctgagccatgattttctgttgcttggtcgggcgcggttttcgtgttgagagagattgttccagaattggagggggttctggtgcgacgggtgcccacttgtgtatctcctgccggaagaaattcgtctcaaaggtgagaagaacctcagcgccctcgattttgcgaaggtagaatattagagttggcacttcctcagtcgttgtgcaggcagcattcgtgaagccatgcaggaaatcacgaaaggctgtcgcttgattaatgatactctcaagaacttcttcttcctcgggctggaaaggcaaagttgcgatctccgcgtgccaatcttgcagatcttcaagcttgggacgagcagcgtcacgcgggatcttttgacgccagtcgcagattgggcaagtgtacttgtcgaattccttcactttacccctagcaatcttcaaacatttcccatggtacctacacaggtcagtaaataaaccacaagctggaagttttttggcttaccattcgtggcagacttcacattcaatcatcattcctgcctcggagtgcctgcaaatacagaacacatctcgctttcgtgactttgggccccacatgttgttgggattgctcggattctcaagcaaaccttcgggagaattgtctcgagacgaaggctccacaggaggtcggtaactgtcctctaggtcgaaacagtacgagtttcgcttcgcgacgtattccatatgggatcttagaatatggagaggcgcgttcgccttaccgaacaactttttcccttttctcatccagtcttcatggcgcttttgttcacgttccaagtcgatcgccccgatgggtcgactcgtcatgtgctcaagagattccatgaggtctcggatatccttgtacttgggccgattcttcatctccgggtccttgctcttttcatacagagtctgtatccgtttttgcgcctcacgctgcttggtcaatatagcatcgacggccgcgagggtatcaggtgaaaccggaaaacgagacgcctgcgcagaaagagcttctaattgctgatagtgaacggcctcaacggacattaattccttggccttcatttcccacgcatccccgtgacgagcaagttccttgaaatgaattaagtgttcgttggtatcagagaggccgacctgttcagcaccagcgacaagttcccggcaatcggtaagggtcatgtagtggtctcgtttgcgcacggcttgttcaatccatttgatttggcgggagacttgctctaggtgttccagttccgggacttccacgttgaagtttttgccgcgttcgatgagttcttcaatctcctggaggggccgggtgtgcgggtgcatgagggcattattaatatcctgttggaatttctcgatttcgcgggttttctcttccaacaccgccatctgtggacagtcgaacgaaagtttatcagcctctgcctgaagggcgtagatatgttcaattctgcggacttcgcgatcgcgatcgtccagctgcgacgccttggtactgcccctgcgccaagctttctcgttttttttccggttctgctgcttccgggtaatgtagttgttggcttcttcaacccatttatcgcaacgctggacgaaggccgcaagatcttgaaggcctggcaagtggtatgggattttctcaccttcatttagcaagttatgaagggccttaagctggggcttcggttcatcctccagggttttgtcgagcttttcggaccatgcttcgggaattctggcccgttcttggactttctgcacgagagactgcaattcttcatcacccatgcgatatcggactgtgtgtcctgagccacacagcttctgagcaagagtttcgccacagcagtcataggtgtcaacgtgcgataaacagacagtcttgcctgatttgtgacaacggaactgagtgaggtaagcgtaggccttgcaatgttggcactggtaatcatcctcgggaaggtcttcattctcaactacgaatctcggctgcacatcatctgccatggagtcaggaccaaagcctggggtgcgagcagaaatttctttttgccggtataagaaagcagcccgatccctcagttcacgggcgcacgttcttgctagtgcaggcgcaagccacttagcagtagcaatagtggtatcacgtgcagcagcggtgagaagtaattcatcgtgggagaaacacgggtgcctgcggaagttctgaagacgatcaacacctgctgcaccgtatggttcccagtccgcaggcgcgaagttgactgcttcattgaaattaaagccgtgattaaagccggcatggtatgcttgagggaacgtgagcacaaattgaccagctcgctgatccaacgcataaacgttgactccggccttgcgaagcttgtctggcggcatgagggtgacgagctggaaaagaagatcaggctggccttcgaaaagctccggaactgcatcccgcatggccgcctcaaaggcctctgcatcggcgcctgggattccgtaccaggtcttggtagcaccgaagtgttggtagttggccgaatacgcgtagtgatcctcattatgccagcagaaagtagagaaacacatccccacataaacccacggaacggtcatgccagagatatcagacttgatgtaacggaagagcgagtctccatagaatggaaggacatttaggttccaaggatctgacgaaaatggatcaagggggttccgctcgatagttgggaatccactaccatgcgtggtcgaatggatgtcggcgccgtactcgacttcgacggtctcatgtagatcaacgacaagcttccagaattcggcctccacgtcgtcctcggtttcgcggcgatgagtgttgagaactggatcgaaaggcattttcgatgcgaagtacttcttcttgaactcgtttgccttctcctggaactgtttgagtgagtaaacaccgccgtcttcaaatccgaattctcctgtgccgactagacacttgggacagtgccagtcatgttccgatggtgtggtagtagagggatcgagacacgctttgtggtatccaagctcgcagccgtcgcatactagaataatcccttgatcatcggatttgccacatgtctcgcatttctgttcatggatcagtatatcatcagaaccctgacacgaacccccgcctacctctccagctggctgggagccatccttgcgcgatttaaccggtgctgggcgaaggagcgacatatgagaaccagcaacggttggaagggaatctagaagggttagacaagatttgcttcgaatattaaaagggcaaaaaagcgtacctttcttgaggcgcttgctgcgtcgaccgcttccatcatcatcgtcgccattttcacactgagaactggcctcgcggctgataccacgcttcagagactcctcatcttgaccatttacaggcgttgagacgaaaccatgctcggaaacgactttgggtgtcaatgtgccgttctctccctcccgcttgattggcgggccgttgttcacgggcgtgaaaggagagtgattgacggcggtaaagccaccgaggccggagttgacgggagtgaagctcgtgggtgctgggcgtgaagcagggggaggagtaggttcgatcgggggtgttggcttctctggggacttttccattggagtgtgtgccattggagaatgtgccactggagtaaatgccattggggtatgcgaagcagccattctaggcaagctaggagtgtcatcgcgaattttagaaggcgtgccattttcatccaacattggcttgtgagtcatgggggattgtagaggcgaaggggtgtatggaccaccatgttcaagctcgagctgttgttgcacaccgggcttggcccgcgccaggtattcctcgtacggctgcaaataccgctggtatgagttcttgagcgaagtggacaaagaagacattatcttgccgctgtatccaagatcacgaccaatttcggcccattttttggtcttgcacactgattcaaacccaccacgactctctactgcctttttaagtttgtagagatctaatggtcgcttgtcgacgctgggtagccggctatagttagtcccatgctgtttgtgaaacatggcaagtccatcgacataattcatgttcgcgcggtttcctatgttcgaataagggttagatccgcactgcggtgtgatcctaccagctggagtaagctgggcgtggggccttacctccttcgaccgaattcagctcttgtcgacgtgtcttgaagtggaatcgctatatccattgtcagacgtgatcatgcgcggaaagcgacggtgggccggtgaaggagggatcctacctctgtatcgattgcgaaagtcggttgccagccctctggtggaaccactcggcaaattccatacttcttcccctccggagcgatcttctgaatataggccaccgggtctttgaattcctcctctgtcggacggaaggtcggggcttctgggataccatgaggacgaatgcgcttggatggttctctggggttgttgggctgtccgcgccgttccacggtggacaaatcgagaggtgtggacctgcgagcgctcaggggcacgttgtgggagtgcgacggatgggtactcgaggaccgagtcggctggcttgctgcggccgtcgaagggggccccccccgggnnnnnnnnnnnnnnnnnnnnnnnnnnnnnnnnnnnnnnnnnnnnnnnnnnnnnnnnnnnnnnnnnnnnnnnnnnnnnnnnnnnnnnnnnnnnnnnnnnnnnnnnnnnnnnnnnnnnnnnnnnnnnnnnnnnnnnnnnnnnnnnnnnnnnngcccgagtcggctggcttgctgcggccgtcgaggtcgccccggcagaggccggagctcccattgttcgaaatggggcaggcgattaggggatatgtttgattgagcgcgcctgtttgaagaaattcgattaacaatgaccgtaatgcgtcaacggcagggcgtgatgatagatatcaggaaaggcggctgccggcgttcctgtcaatatgaccgaagggtgaaggatcggtaacgaaccaaaggatatgagagaatggatattgaggacaaacgaaaggaaattttgactcggggcgaaaggcaatagaacaagaaaagagaggcccaagtcgcagagaggaaagaaggatagatgggatagaaaccttaagagtggaggaatgagattatgtgcagtaaagatcgactgggggtggtactccggaagtactgccaggttctttttgtgtggccagccagtacgaaaggaaccaatgagtgactccggggggacctgccaccagccgcgatggtaccgatcagtacggtaaaggagttactgtaagaatgagctaatccgagctcaggaaccgcctgtaccctgactttcacgtgaaattttagtaattatactgcaatgctgcaaacggggatcatacggtgtctcctaaataatttcgtgtacggaccgcagtatttgggagcccaatgttacgccgtagacctatggtgtatggtggatatccaaatatagtgtcttgtgacatattaacttgatagagggatgtgcctcggatactggcgaaatattacctgcgtatagactttgtttctataattgcgatgtttcaataatggcttgatatgtattttattccggtttattgtctttttgatatcttcaaatgtttatcaatggagttgtgacatagttgtttgtgagactttcagtaggcattctttgcacatcccttcgatacacataactatcgtcaggtaagaactccattacatatgtaagtccctatcatccctagacagcaatgcaattccatttccccttagaggggaaaaaatactttatcatgtgatctgtatatcacggtaccgtttggacccgcacgtattcgataggcagagctaatttcaaggactcgacaagccgacaacattgaattgaacatttcaatgtcaaaaactaaaaaaattcctccaaatcaaacatcatggaggagtctgaaacccctaaaccaatcccggcatattactgctgttatctcctccggtcaaccgttcgacacgcatcactatatattggctcgacgccaaacccgatcagacgactctctcagcacaacggtgttgccaaaggtggggccaagcgaacggccagagataaattacgcccctgggaaatgaccctggtcgtagagggtttcacgagcagagtcggcgctttgcaattcgagtaagtcgcatgtgaattgtttgtatatatcgcgtctcaatttctcattgcgcgtagatgggcttggcaacacccagaaaggtcgcggcaccttgattccgaagatgatctagactccaagcctcgggctaaggccaataccgatgcgaagacgggcaaaccaaaaccgaaacctaaagcgcggactaggagatccctaacggcgcatttcgaggatttgcattctctacttcgttcgacctatttctcctcttggccgttaggagtccgtttcttttgtgttgatgtatatcgtgtatggcgagcctggaatgaccgtgtgaatggtcgcttacccgacaacatcaaggttattctagatggagacaaccttacaaaaccgcccggtccaaagcaaggcgacgagttcgcacccgttggaagcattaacagtttatcaattgactacaccaggatagaagattatctcgaaaagtcaatgttcatgctggaagacccggatgatctgcagtgcacggtctgtaaagagtcgatctctccggacgaacaacaaatagttgtgtgtccacacccgaattgccgcggcacaagccatttattatgtctatctaccacattccttgatgcgaccaacggaccagacctcctagtgcctactcatggaacctgcccggcgtgtaaaaacaccgtccagtgggtggcaatgatgcgcgagctaagctttcgcaacagagcagagaaagaaacgcgcgcaattctcagaaagaaggagaaacgtgttcgcaaagaatctgccgccatggaggtattttcaggatcccggtctgctattgaaccaaggtcattgccggacgaaccgacccaagacgacctagggccaaactggttcgaggaagtcgatatagaatctgactcagatttcgagggtcgacaaaagcaccgcccgacccaacctccatcaaagctcgagatcgtgatcgaagacagcgactgggatgacgcagaaatcattgaatgaccaaaccaaacccagttttatttctaattccttaattcgcaagaggctctaatttcctcaacgcgcccgtctcgtccagacgtgcaatgcaacctgccacagcactctgtatctcccgtgacacctcatcaatggatttccccgcatcgataatagacacatcctgctgcttctcgaagatcgtccggaaaagctcccgcacgcgggtttgcattgcctcgttttcatatcgctcggcaccgaacccaccacgttttgctgcttcctcgggtgaaatgctaaggaataaacatatatccgggcgcggtagaccgatttctggctgccatgcccagtccagtgatagtgtggggttcgctttcgcggcggagtaaacaaccccggaatatgagtagcggtctacaatgacggttgttccgtttgtgatatcttcttcaatgctccttgcaatttcccaccggttcgccgagaaaaggaggtgaatggaatggtcgtcttggtgggatgtgccgcgtagatagctatcaatcaacttcccgatgggcgtcgttctgtctagaggagattattagaccaatgcacccatagtaacgattaatcaatacctgggaatcgaatgtatttaaccacatgcccctgttgcgagagagattcccgtagcatctcacactgactcgatttgccagcgcggtcgagtccttcgacaacaatgagcgctccgcgtcgcgtcggcggtgctgatgggcttgtcatgattgactggaatacaggggtgtgattatatgtaaatatctgagagttgtaggtgaggatcctcaattcctagtgaaatgtgtgaaatagcccaaatgtttccgaaggatagcgagttcgatgtttatcgggaaatccgatttcttcgataagaacacgatctgtccaaacatggtctctcaataaccacgaacgccatggaccaagcgacgtccgcgtccccagcgatgaccttcagcatcctggcatctactgctccaatccttgccccgcgagtaggaaaattagccattccagggcgcaagaccctcgcaacgccgcaccatatcccgctcacttcgcggggcacagtcccacatgttgcgcacgatgtgatgcgcgaccacactgagatcaacagcttatatgctggattagaagattgtaagatgaatactccgagatggctacaagtctgttctcatcaatagctgacagcgcatgcccatcgggcatataaaagtcatcgcgaaaaaggaaccctcggtttacaggacaccagtcgctgatcacgagtcgcccttgaagaaattcatctgtgtggctgaggatatgcctctgatcctaggcccgcgtcgattccctccgatcccatgcccgcccgcgaacacaaacacttccatcgcgctgctaacatcggtcgggttcacccagttatctgcgcatgattatgtgaaggcgattcagaaattgagaccagacattgcggtcgggatggtggacctggctaataagcagcctgggtctaagaggcgagggaagatggttgaccggacgcatgcctggacacgcgatgcattggagcagctctacggggacgctgtggcagagaaagacaagtcaaagagcgcatacttcgcaccggtactgcctcttgataatgcgcagcagtctctctatctggatgatttggagagcgagttccgctgggatatatccggcctggcgctatatgagtctgcgtcactggaattcgtcccagagtcgctggcgggtctgcctcggttgctcttcagcgagcccgagactccccacactatcctgcgtgacatatcccttggggcagacctcctgactacacctttgctcggcgcgtcgtcggacggcggcatcgcgatggaattcgtcttcccagctccagctgccctgcaagagggcaagtctaagcctcagcctttgggaatcgatatgtggaccgctgatcacgctaccgatatatctccgctgggcgagggatgtgaatgctatacctgcaagaattaccatcgtgcttatattcaccatcttctccttgctaaggagatgaccgcttgggcgctccttcaagtccataatttccacgtcatggataccttcttcgcaagagtgcgggatagtatccaacatgggtccttcgagcaggacgtgcagacgtttgctcgtgtttatgcctcttcgatgccggagagtagtggagaaggtcctaggtatgtcaattgccaattttcaatgtgtttttatttcaaatcactaacggtcttgccagattacgcggttatcaactaccggccaacgggcctaaccagccccgacgcatgcccaagatatatggcgctcttgacgatgctatacagaaattcgccgatgcccagtctgaaatcgctaccccggacaccgacgcgagcgggctcgaggaacacgggtttgctgagaagttgtgatggcagcggggagaatcgcctccggcaaacgcttgcatgagaaacggtacgtatttatggaagcatttgcttagcaattagcgtatgatatctatagatcaacacaaaatatatatactggattgttacaggggcccttctttggctaattcgacccctctgtcttacacataaggcatcaatttcaatttaccagacttaattctacacttttgaattctactttacgtacgcggtagtcaaaaatcccttaatgatagttatggcggtaagctgaatcctgaaaaaccagacagaggggggtaacaatgccctataaaagcaggagtgcacgcatattcataatattcatctcaataggatggggtcaagactagtgtacataaatccagattttgtgccattcttagtctatatgtccaggcttgcccccattaaacccccaaccgtcaaccgtaagaacactagggtatatctttatcctgatttgtagaaagacgcattcttaaacctcctcgcccgccaagacccgccacatccacttgacctcgtcttcctcctccttggagccctgcttcgtaccggcaccgaattgctgaccgacaacacacacaagccaagcgtcgttcttggtggtgtccaggtaggtttcggtgggcgatccgcgggggtagatgcgacgccattcgtcccagattcggaacgcctcctcaccccacgcacggaaactcacctcctcgatgatcgttggggtgacgatctccttaccgcggaacacaccccaggtaacagcgttgacactctcggggttggaggcaaggtcatcgagttccatatctgcaggctgggttgggagcgaggactcgaaatcgcccttgatgtttgtggcgaaccaggtgagcttgtcgcggccgtgcttagcgaacattggcttcaggatattggtgtagtcgtcgttcgagcagaagaactccacaaatggcttctggaagacgaagccttctcgttggggaccccagccgaagatggggtggtcattgtgtacaccgttcacagcgggctgcgaggccagtgtccaccagccgcggccatcaatgagcttcaacaactccggtcgaatcagttcagtctctgcgttcaaaccctcaccatcctcttcggcaccaccctctgaccacgggaccatgtgtagctctcccgagacatggcgacggaaaagggtgctcatgtccttgttgtccaccgggtggccccatagcctacgtgcggagttggcagtgacatggagcgagggaccatagccgtcgatctcaccaaaggcaggtgagcgagcatcaccccatcgtccgttggggaagtcatcccatgttgcttctctgccaagggcaccgagaccctcggagatgagaagagtagtactgcggtttggcgggggtgcaggcacgcctgcgctatctgcgcgggcctcgtggacggagtcctgcgatgacccgtggaccgatagcttgtcgacaatgacgcggttgcggggttgcgagttcatagaggacgcacggcgtctgcgcgaggcacgttcagcgaaatcgagtggaatcgatgcaggaccatcctcgatagcattttccccagcatccgagtacgacggaatcaaatcgcattgttctaggatgaatgatactgtcttctccaagttcaaggtgtagaaatggaatcctcgcggtcccggggagggaagctggctcataccacccacaatctcgctaacaatatccacacccgcgcgcttgaccgcgtcgtcgtcgtgttttaattcttccatgcgtttggcaatgggaggtggaatcgtgacatggctgagcttagtcacgcgggtgagaatcttatagctgtggatgggcatcaaacccgggatgatggggatagtcttgaaagcaccagactcatggttgcgaagcatgtgttcaaacctttggtaagcgtcgaggtcgtaggtcagttgggtcatgatgaaatccgctccagccagtgtcttctcgaccaggtaaggtatatctctggccggatcctggacgtcctggaacgtgtcggcgggatggccctccgggtatgcggccacaccaatacagaagtagtcgccatgtctctggcgaatgtatcgtaccaaatcaatggcaaaagtgaaatccttgttgctatcgtcctctccatgcatgttatattcctcgctgcggggcggatctcctcgtagggccaggatgttgcgaattccgagaaccttggcctcatcgagagccatatccaccagttttcggctcatgttcgtacatgtcagatgcaagacggttgtcaactgcagttggcgctggcatacttccgccagctcgagcgatcgtgcggcagtgctaccaccggcaccccaggtaaccgtgacgaatagaggacggagtgcttgtgccatccgctccagacgcgcggacaggttggcgaagccctatagtaggccatattagcaaaatatccacgactgttcagcaggcggggtaacccccaccattcgggtctttggagggaagaactccaaggaaaagtagttggcatctggcggcagagccgcgatcttctcggtgatcttcttctccattgcgtcctataagtgtatgggtcggcaatgggaggggttgaatgaagaagagaggattcggggcaaaagtggaccatgtcaccatctgctccagtcgcatcgggaactatgatgtctacagctgccgactggccatcgtgcatgaaaggtctactgcaaatacactacatggatttaaaggcttaaatactgttcctatgcaaggagtaactttatcttgatcccgaagagctagagaaaaaaaaaactgacagtgcaagagatgactcagcgagacaatcgttatttttccccggggcccgaggtctcatcgggatcggcgagcttaatgcgagcacttgtttagcactcatgtattttggcgtcggagaaggcatgatcttttgaacatatgtagtctctctttttgaactccacaagtttaccaattcattcacggaaaaatggcctcccgaccacccaacgttctccgctatctccgtctccaaacaactcgacacgctaggtcgcatgcgtcgcgacgaaccatttccactccatcccctccacagccaccgaaaccgtcacagccgatccccaatgactctcactctcgcctgcgtcggctcaacgaccgcatccctcgctttctccgcacatacactacacccttattaggggcgccggtcacccatatcacttcattcctaatacttcatgaaataaccgctattgttccaatatttggcctggttggtgcatttcactatggtgtttggatgccggatcttgcatcgcaaacaggcgagaccaatgccttcgacgaaggagctgcgcgtttcggccgctggctgaaaaagaaaggttgggtgaatgagtccgacgtgaatactgttgccgatcatgaaaccactgcggagaagactgtggaccgagcaggtgttcgattggtgctggaatttgctacagcctatgcggtcacaaaagctttgttgccagtccggttggcagtgagtgtttgggcgacaccgtggtttgcaaggtcggtattcacaccgatagcaaagctagccggacgtctcttcggcagaggataagctagtcgagcactactactatgataccagagagaagtatattcataggtctatgaatttgtatactgtgtattttgtcaagccattggacttcttcctcagaactgctgctttacgctatgctacaagtgtccgaacaagaaatccgcccgactagtccacttaaaggcgaagaatttattcgtaaacccaagcggcctgggcggaggtgtacttgaggacctcggaggcaccgaaccagagagcaatctccttcttggcgttctcgacggagtcggaaccgtggcagacgttgcggccgacatcctagtcaaattgttagtatgtaatgacacgatctcagaacatacggggttccttacgatggcgaagtcaccacggatggtaccgggggcggaagccaaggggttggtggcaccgaggaggacacggccagtcttgacagcgtccttaccctcccagaccatagcgcagatggggccgctcagcatgtctagagctgtgttagtgtatctggatttgcggaaccattcggacgaggaaactaacaggcgacgagacccttgaagaaaggcttggtggcgagatcagcgtagtgcttctcgaggtgctcctggctaggggaggtgagcttcatggcaacgagcttgaagccacggttctcgaagcgagagatgatgggtccaatgaggccacgctggttgatgctgttagtaaatgtcgttcaattgcggagctcttccgggtccgttatgggttcaagtcgaagggggggggtgtgtccgtacctggacaccatcgggcttgatggcgatgaaactagagcaattgattagctttaccggcagcgaggggtaatagcaatcgaaaaagaagggggattagggaagactgattttgaagcacatacgtctgttcttcgttggcggacattttgaatgtatgagaatgataatcaaagggtatggagtaggaaaagagagcggaagagggaaagattaaatagaggcttttaaaaaactcgggccttcccacttgggccgttgattggtggccggaaaggaggggtgttgatgcccgatgcctgaattgtaaggcatgaagtggacttttgtaactaaatatactcttttcactcttcgcttcatggacccgactacgaagatgaaaacatctatcaactcgaaaataacagttcaattctaataacagcatctaaattcaagccatgattccttcaaataacgactcgcgtctagccccgtccccagccgtttcccctggcaacttcccctgaacttcagcaacgtgcaatctcccaactagctcccaatttctagtttcaagaccctctattcttcgatgcagtagaataatttcttgcaagcctctaagtaaatgaacagcggctgctagggggagtcgccgttttcggcctctgtatactttgcaaacagctaatcgtcagggcaaaagctgaggggagatccagctcgacttagctggcattacaaataaaggccctccatccacctgaaaagcaaaatacacttagaactatgtactcgaagtatatatgtacgggttcaccatgtcaaatagggagaactcaggctttattatctcggtctgcaaacataacgttgtcttgacgaagatcgttgtggacaagattcagggcatgaagatgatcaatgcctgccctgacctgctcgaggcagctttccttgtcgaccgagcgcccgtccctcaggcggtccccgagcgtatccgcgtgtttttggaagcagagcccggtgatccggtcgtctttcaccacgcagccaagatagcaggtgacattttcatgtgggtgttccattgggtgttccattaaaaactggcagatatgcacttcctggagcaggtatttgctgaatgcctctgatttgtcgtagcgagtgagctggggctgcttgatctagacgtccggactgtgagggcttttgtatattgtgaggttatcatatagccggggccagatgtgctctggtgggatcttctggaagagtgattggtcgatattggcggggtactctagaagatgctcctttttgggctgatgggaccaaaagtagtcgtcgccatcctggaagataacgatcgtgtatagaaattatgggataccgctgctaaattcccaggtctctcccttatcataagatctcattttaataagagaagactattttttcttgaataggatttcaagactgcgaggcaatgaagaaggctggattacaagcatggagcccttttcttaagtgctagggggcgctaggtacggaactctgccataagttgtaaagtggaccaatgaagtatcaggtgatagcgtgcggtgaatggcaaaagtgagatattccacagaagagtgatttataaaatactgcatcccgaaccatttatctactacctacgcgcatataaccaaaaaagatgagtgacatgctactggatctaataactaatcctgacaagcattctccaatggaccaaggcttttctatagattcttgaaaatttactgggtggtggtcaagatcaaaacaatgctccgaacgataaggctctttgtcggcccaagatattgagttcatgactttgtcgttgaatcatacttatctctccgtctcccccttctatgtagatgatggtcaatgttcttttcctttttctttagagtgcaccatcgtaacacgcctgaaattcgtttagtcatttagatacgtgtactagaacttctaggatttgggatacttttcgccggaactcagtaagtccttgcctactttgctaatcaagctcgtccaatttatcgggcaaaatgcctgtgaggcgctgatgcgatactcgcccttcacaccatgaggtctggtctcatcatgccccctacagcccgcagtgggtccggggccccacttcgggttagtctaaaatctaggacagcacacggagtactgttagtttatgcaaatagtggctgtaatatagaatattgagcttgcaatatcacaatagtatgagcgagcagagatacgagtacatttttccattttaaaaactacataataagtacgtagtacaaaagacaaataaaacccagaaaaaaagacaccaaaaaggccacacacacccagttagcataatacagtccattatattgctcgctcttctcctagcctcatatcaagtttcttgcaggtagctccatattcctacctcatagtgcctaggtgcagcttttgtatggcctttagaatacctttgactgttgtgtttgaaaaaggaaagaagaaattccatatagctgagtgaccttgagacattcattaacctcacagaacggtaaaacagaacggtaaaatcacaatgtccatactcacatgtatgtctctctcaatataacctagtagacttcaaagatttccattctgcgatgtccaccggtccccgggcgacagagtcaccaaccaaatcgacaagagcatactgttcgccggagaaaaaccacgcctgacctttgttcgttctcggcttaaaaacaacagtatcgattgtcttgaacttggctgctgccaaagcattgaagcgcaacgcgatattacccgattccaagagtatattccggatgacatcaattagagcgtacctttccttgcggaagaaacataccacatgttgatactcgcttcctttgaaactgaaaggcaatgttgcgtccaccagttcaaagcccacctctttcagggcaggccatttctcctggaacctgaatggcttgccgacgggatatccgttcaaaccatggtgaccatggattctcaaacaacgagatccacagaaaaagtatgtatcaacttcgttgtctgttgcaacgaatatggaatttattgggcaaaatccgaatttcttaagcgcgggccacattgtcaaaatgtcatctccacgtgtgtcgctggtatctgtcatgacattgacgcgggcatactggtgatccttccagaagtaaatctcatcctctgaccatgtaagtgggaaaactgccttggtcgagccggagaatcctagaagtcccttgacacggtctagagggtcgactcctactggaatagtcgagtacaggacctctccgctcttcttaaagctcctgatgacctgctggccaccatcatccagaaccatccagtcggcaaagttgttcgccgttgctttgtttttggcattcttaccgaccagaatgtgagcagggttaagtaaaagatcgttttcgttgtcgtctccttcagcctaaattggatgttagcatgtaattttcgatggtacatttccgaaataattacaaagatcgtaagctgttttctcgtctcatctccgatccccagccaagtctccttgtctgtcacagtgtattcgcctttactggccgcctcacgtatagcttgaacggagaaaccagggaacatgtgataccacgaggttggaggatcggcccatggaacctggctaatcgtggcccagagcagagactctacgatgtttccagcggatctgtcataactgagtgaaagcaaatggttagttagtggatgccaaatatccgatgatcgggaatgaaggaccagcccgaatacctaccgcgacaggaacttgatgggcttcgctgaatgcttgctctcttccattcggttgaacaacttggtaaacagacaagatactctggtctgtctatcctctgggaggctagcagggttgtgttttgggcctgcagtattcaatacataagattaaccgagacttgaaatgtttattggagaggatgaaaagcataccgacgagcatccaatggtcccgccacgcgtacacgactcgttcaatgaccttgtcatctagcgcatgagacgtgatagcgatatcggcgacctctttgagcagattctcagtcataggagtgctatcagtcttgtaccattcaataaggaaaggctcagctttcttgtgatcgacacaactattggcctgtaggtgagaattttgaagctttaaagcattcccgcacacattttttgtcttgggcaaaacttactattggacaaaactttttgccaaagcctccagcagaccagactgaccagctccgccagttgcaatacggagaagaaccttctccttgtgggcgctatacacggcagtgggagcagttggttcagccatcatcggaggttagtgaaggaatagtcaacaaattcaaatgatattgtacttgttcttttctaaaatctgcagatatagatcacaaaggtatatatactctgtgccggtcattggtaagataatttccctcgtcgaccacaggggctagctgatgttctacaagtcgaccacagtggctggctgatgttctacaaatcgacaaaagtggctggctgatgttctgcaagtcgaccacgttggctagctgacgcattgacgacatgtctacgcagcaggatagtggatctattttgactggcagggggcagttcacgcagccggtggcccacttaaatcacgtgaaacatccactgggtgagctcacccggcacttacgagtgatctcgccggcctagatagtcgttgccgagcaaagcgactgattctaacttctaatgctgtgcaaagccccctcttactggcttattggcttcagaacgaccccgcggcttgatcaactcccttgcttttgtcataattctaggagaaaacttggccacgtgacacgtacgtaagaccttctgatttagttatagtttacttgcttcgcttcgctccgcaattattgcacagatactgtatgttccatgaatgtatagaataacatgactactgttaagttcttaaaggtgttatccctccctgattcgcctcggtggttgatgggaggtattgacgagaaatgattggtagaagtttggtattgttaaggtattgattaggccatcagtcacgtgttttaggtgggccactggttgggtagattgagtaggcgagcagattctcagttgctatctctgctcgtatcttatttttgtgcattgaattgtatgacacgtcatcctatattgcagctaggccgaactgtaaaatggtttttatcacctattcccgtatatcgagaattagtaaaagagagtagaagtacaaaggaagctactggcatggcaggcatctctaaatacgttccgacatcgggctctcctatggagactacactgaagtattggcgccggttgcatagatttgcatagactcgaaacaaacgtttagtcgtcaacatgtaaggaatggaaaatgaatcacgacagaaatgggactaaatcatttcaggtgtttgttcctactcaacttcttggttcgaatagaatgccttaatcttcctcacagaataagaatagtccgctttgacgtcctcgagcgcctccacaatccgtctcaagcatagctcagaatcaggttctggtgagccgtccaaatcttcgttcattccgtagtgctgaattttttcgcagcctttctgcactttgacaatccctatagttgctgaagaattttttaaaaaatgggcgagttcgtttatttgtcggagttccccctccgttctatattgatttaaagatccgtcagcaatccatcataattgattattattactcaaaagccccgtgcataaaagtatcatttcgtacaaaggttcaactttgcacatttacttctagcaaggtttcacgcaaagttccagtgagaccgaaatagtctcgagaaacagaagggcgaacttacattgccaaccccattcgttcaaaagtctcttcagcttgctcgaaaaagccatagcagatactggtgctgaactctctatcgtcggggtcatcgtccatttccagaatctgacagaacacagaataatccactgcgtcaccgaagctgtcctccaagtcctggtaacatggttagcaactaaatccgagggcccaaaaaaagacaattgacattgaacactaacttttcctgtattggttgacatggtattcatttgtctgttcgtaggtactgtgtgttgtctggagatgactgaagattgtaggcgagagacgagtttatgtagacagcaaaaggatcgaccagtctgtccgagtgttcagcttcaacgtcaccgagtcgatcattgagtcgatcagtgttttcagctaagagacgatcacatattgctttttcgggtacggaggagcgagataccgcacaaacccacaattcgacttcgttctcgcttcatggtgacaggcgattatgtgatctctgaatagcttcatactttcataatatggggctgatcgtagaagtactacatatgtggctggtgtcagtcgaaggctgtgctttttatactagtgtgataccgtaagtgccaagaggtactcggcctaattagattagaggactgtggcagtagtgattcgggctgtgccaacagtgtttaccttctatgcatgtgactgaactaagcaagatctgctagttagttaacatctaactaccagcctgagcacggcagatcaatagaaaagcggtatagtcacagttatgtggtcatatcgcgaacgccgattggttcaaacgcaaagcaagttgattggctgttcagaagctgtagtggctgccttgttgccttaggggtcttaccccagctcaggccagctcagcttgtagcttctgttgacggcatctccacctctaaatgcaggtcaatcattgataaccaacgccactctgtcggagattgagggtctctgattgatcgtactatttatttcaccatggccaggagtctacctgcgccccgttgggcaatgttgctctccctggttatccttctcgtctgcattgtggtccccggttgtaaggttgccttttgccaaatcgcaagattacagaaagctaactcttatgctacgaacagttgcggtcaaacacaaggatttcaagacttgcgatcagtccgggttctgcaaacgaaatcgtgcctacgccgatgacgcctcttctcaaggcatttcatggagctcaccttacgagctagatcccgccactatacatttcaaggatggaatgcttactggagtcattttgaaaaccacgactgccaatgaaaaggtccggctacctctcacggtgtctttcttggaatcgggagcagcccgcattgtggtggatgaagagaagcggatgaagggcgacattgaaatgcgacatggcagtcaagcaaacaagaaacgatataatgaagccgaaaaatgggctatcgtgggtggtttagaagtcagcaagtcggccacgttgaatgcccagagcgaaactggattcacgaacgtcttgtacggaccggacgacaaattccaagcgatcgttcgccatgcgccatttggagtcgaattccagcgggatggacagacccatgttcaattgaaccaccaaggcttcctgaacatggagcactggcgaccgaaggtagatgccgaagacggcgaatccggcgaagatgagagcacctggtgggaggagacgtttgggggaaataccgactcgaaaccacgtggtcccgagagtattgctcttgatattaccttccccggttatagtcatgtatttggtatcccagagcacgcagattcgctctcgctcaaggagactaggggtggatctggtaaccatgagaacccttatcgtctatacaactccgatgttttcgagtatgaactcgaaagcccgatgaccttgtacggagccatcccgctgatgcaagcccaccgcaagagctccactgtcggggtcttctggctcaatgcagcggaaacgtggatcgatattgtcaagtccactgcctcctccaaccccctggccttgggcgcccgctccaaaacagacacccagactcattggatgtctgaatccggtcagattgacctgttcgtcttcctcgggccgtcaccgaatgatatcagtaaaacatatggtgaactcacaggatatacacaattgccccagcagttcgccattggatatcaccaatgccgttggaactatgttacggacgaggatgtcaaggaagtcaacgccaaatttgacaagtaccagattccatacgatgtgatctggcttgatcttgaatataccgatgaccggaaatacttcacctgggaccctctcaccttccctgatcctacgggtatgcagcaaaagctcgatgaaagtgagcgaaagcttgtggttttgatcgatcctcacatcaagaacgcggacaagtacttcgtttcagaagagcttagaagcaaaaacctcgctgtgctgaacaaggatggcgaaatctatgatggatggtgctggccaggttcctcgaactgggtcgactgctttaaccccgctgcgcatgcctggtgggccacgctacacaagtttgacaaattcaagggatcgcttcagaatcttttcatctggaatgatatgaatgaaccctctgtttttaacgggcctgacatgaccatgcccaaggacaacttgcatcatggaaactgggaacatcgcgatgttcacaaccttaatggtctcacccttgtgaacgccacctacaaagcaatgctggagcgcaaaaagggggagatgcgccggccattcatcttgacgcgctcgtactactccggggcccagcgggtgtctgctatgtggactggagacaaccaggccacctgggaccacctaggggcttctctccccatggtcctgaccaacggtatcacaggcttccccttcgctggcgcagatgtcggaggattcttccataatcctgataaggaccttttgactcgatggtaccagacaggtatatggtatcccttcttccgcgcgcatgctcacatcgatacccgtcgccgtgagccgtatctgatcagcgagccccaccggtcctacatcgctcaggcaatccgtctgaggtaccaactgatgcctgcttggtataccgccttccacgaagcctccgttaacggcacgccaatcgttcgccctcagtattacatgttcccagaggacgagcaaggctttgccatcgatgatcagctgtaccttgcttccacgggtcttctcgtcaagcctgttgtgcaggagaacacgcatagtgcagaggtatatatctccgacgacgagaagtactatgactactttgatttcaccgtctaccagggtgcgggcaagaaacacaccgtccctgcgccagaggacaaggttcctgtgttgatccagggtggtcacatcattccccgcaaggaccgtcctcgtcgcagtaccggtctgatgcgatgggacccgtacacactagtcattaccctagacaagaatggcgaggcggaaggcagtctgtacgtggacgatggcgagacgttcgactacgagcgtggcgcctacattcaccgccgcttcaactaccgcgactcggtgttgtcgtcgaaggacattggtaccaatggacctaagactgctgagtacctcaagaccatggctggtgtgacagtcgagcgggtggtgatcgttgaccctcccgctgaatggaaggctaagaacatcgtgagtgtcattgaagatggagccaagtcaggctctacggcctccttggagttctacgagcaggaggccgggagggcatcctatgttgtggtgaagaagccgaatgttggtattggaaaggcatggcggattgagttctgattgatatctttcatttcttgcacaatacatgtatgcaatattcacgtcattagaagttgataagcctgcatatggttctttatataaaattgtccgatagggaaaacttaccccttcacaaaatctaacgccatcatatcgaggattacttctgatgcacagattctcacgcagttgttcatcaagaaaccttccagctttgaaattgagatatgcaacctcaatgctaaaagtttgtcctcgcgccgggctgtggtgccaaccgctgccgagtttatttagagtttctttgatgctttcgatcttcctatcgccttgtccgaagcgggccaggcgagtcaagctatcgaatgaccagcccaagccatgtgcggaattctggtggtcttgattatactacggctcgtgcacaaccatatttcccaccaatagaacgatatgaaattctaacgcattcatgtgcatctctcttgttgcagcttgagacaggattcttgagcagacacgacattgagcactatatcatgccaagttaacatagggcttcttggtggaaacatccaaacaagctcgaatgccctcctttccggccagaaatgtgaaatatgtcgcagcttaccatatgtccgaaggagattggagcagatgtaccggataaaggtccggagaaaggcctggagaagacctggagaaggcccagagcaaggccggagaaaggctcatcattgcacaccccgcatgccaacccacagtggttgtccgtgctttccgcagcaggtcggactctgactggatgcctatttacaagctcaccttggcaaagaccactattggtcgcccccacatacttctgggagtcactggatcacgcccttcaatgccaagcttccccgcatttcttggctattggaacgtagacgccaagactggggtaaacaatggcatctgaaatcattccgtcattctatttaggataaccgacatgatataactagctatatccctcgtttggttgacgagactctataagtacaggaccctcgagcgtggtagcaacgattgtatactaccaatccacagctatgaaccgcggctctatcggaaaagacgatgtcgagattgtcgatcaaactgctcatgtcgaacacattctcaagccttctcttgtcactcagattggagactttcgtgtcgtcggtttgacccccgaggatgcagatttctataacaactatccggaggacaaacgaaaaagagtcttccataaggtggaaatactagccattctcatgaatatccacctgactctgtgtacaggtcgataagcgtctgattcccatgctcgcagtgttatacttgatttgccacattgatcgtgcgaatatcggcaatgccaaaatcgaaggcatggtccaagatctcaagatgactgggttgcagtataatactgtactgtctatatgtaagttcatttcctacagccaactcttttgtaactgatgtgtaatggctctcaatttagtcttcattccctacgtcgtgttggaagtccccagtaacatccttctcaaaaggttcaagcgtccttcggtgtaccttggacttcttgtctcggcctggggtattgtcatgacatgcacgggtctggtccagaactttgctggtcttatgaccacccgagtcctacttggtgctcttgagtgagtgacaatgatgaacccctttctgcttcgcattctaaaatccttatagggctggtttcttccctggtgctatttacctttgctcctactggtacatgcctagggaattggcgcttcgtatctcatatttctactgtgccagtgcgctctccggtgcattttccggcctgttggctgccgctattgccaagatggacggtattgctggacttgaggggtggcggtggatcttcattctggaaggtcttgctagtgtggtactaggtgttgcctgtttcttccttctcatcgacaccccggctttagccaagcgctggctatcccctgaagaaattcgctacctggagctttcaatgttcgtcaagcaaggaggaactagtactagggagtcgggtttcaagtggagagacctcaaggtggtcctgatgaactggaggatatatgtgcaagcctaccttttattctgccaatcggccttgtcttacggtaaccgttgttcaaatccgattcgagacattgggctaattgaatttccacccaggtaccaagttcaccctcccgactatcaccaaagccatgggattcagctccacaaatgcccagctcacttccgcccctccatacattgccggcgcaatatctgccatcgtgtttgcacggttgtccgatcgcttctattggcgaatgccatttgtctgcatccccatggtatttgtcgtagtagcctattctattatcctctccctgaacggggcgctggaagcaaaaaaaggagtggcatactttgcagtcgtcttgtctgtcataggtatctatcccattcagccaggagctgcgtcttggaatgcaaacaacatcgccccagcgtctcgacgggctatgggcatcgcgctagtgaactgtgtcggcaatgtcggtggcatactgggtagcttcatgtatatcgagaaagagagtcccaagtacaccactggatttggtctcagtttggcactcggtggggttggattcttggtagctttgttcctcgaatggacatacaagatgggcaatgcaaagaaggcaaggattgcagatgatgcaagagttaactacacggaggaagaattgtttgatatgggagacaagtcacccctattcaagtatgttttgtaaatactttgtgggcgggaatgaatttatgatgatgtttttttgatattacgatatgtccgataaaacgctcctgatatcttcaatctaagccagcgcaagcctcttaggcaggtgccatcctatatcaaacggtttcgtgctgatttcagtttgctctcttggttccttccgttctccttttactttcctgtctcccacatctcaaactttttcaatttgccccttctcgttggtatcaactcacttaaagagaaacacaccaccgccaccatgaccaccgatgcgtcaacaaccccatctgagtcgcagccgaccgaacctggccctacaagtcctttctacgggatgtatggtcattactggaagtcaaacagggatgtgccgcccaccaaatggctgtaagaatcagtttgaattgaaccgttgaatataactaaccgattctatcagtcaggagagcaagaagctctgcgcttgtgatgcccatcaggcaagccagtggccgatggaacacgcattaattgtaagtggaaacgcccaaacagtccattccaagatgccaatcttcttggccttagacgattcctcgctgcgcctacaagtgtccctactgcccaaagttcgataccctcgatagtaccgagcctcaggtggtgaagctccgtgctcatatcgtacgtgaccatttggtgagactatcattcgtgaatgacttgcggcatactgacgtcgattagaagagaaaatcatatgaattccttgggttcgctgtcaccccggccagagtcacaaaagcccgcgtgccgtgagttagccttgttcaacttcaatcacctacttctaatcccattgattcttctagtaagccatgacgttggtagggttcagcggttcatggtgcatgcattttcgcggttatgggttcattccctattccaagaagagatttcgtaccacaacagaacttcaatcagaacgaatttacgtatctttgtgcttacccttttccatgattaaaaacctagaccatttcggcagaaacatgaattctatatgtaatcccatcttcaggttcctttgttttcgttctcaacttctatgatatcgtaaataataagcatacaggagatacttatcattgcttgtccctctttatagtgaaatagatactcggtataccggattagctagtgctcaaggcaataaaagtgtagtaaaataaagaaagttgtcctttcgaaactagcaagttcaagattcatcattattctcagccatccataaatgttagcaaataagcctcctaataccaccaaaaactagccacataattaaagcactgtgatttggaaattaccaatccgtttctgtcatcgtcgaatcgttttcgtcctggtttggccattcagaacgacccacaagctgccatggagcatagatcatttcttcgtcgatcaagtcaaacgggttctcgaagttaccatctaccaatccccagattgaagccagagagatccgacgatagtgcggatcctcttcctcttccggagggcagccgtcgtcactctcatcggtgaattcggcttcgtcgtcggtgagagtgtcttcatttatgcagcgtttgtattcggcaactatgccgtcagaaatctcatttcccatcacagtatctttcattgcttcttcagaaagctgctgttgaaggtgttggttttgcatttcgagggtcttcaatctgatgtccgtgaagtcgtggctcttcttaccatcctgagagaccgcatatcggattgaaaattcattctttttgttctccgaaatctcaaagctgccggccttctgacaacacccacattcgacagtgcagtggccatttgcatgcttgcgacgatcaccaataaatttgcgatcaaggcaacatccacactcacgtccacagcagcctcctctcctagcgcagtcctctcgaagaacacgatgcatgtaccatttgggatttccccgccagagctcaaaagctcgggtcaaaggcccatcggagaaagagtcccggatcgtccaccactcgcgctcaactcgtttatattctttgtttgattcgctaagctcttgttcaactctcgctccacttagctgataatattcccagcgcatttcccgttgagcgatctctcggagcctagtctccacgtcgaggaactccgccaggcgatcttctttgccgtcgaggtcttgttcatagatgtagagttcaaatcgacatcgctgaagggcatttatgtctccaatctgtctgatctcgtgttccaaactgccttccataccacgcgtgaacttcttggatatctccagcctgattatattgggtccggtttcaatttcatggagaccttttatcttttccttgagtttaaattcctccttctcgagctcagctctgtcgtgttggattctaagctcctgattttggagttcgattctgagctcatggttctcaagtttgtttttgctgtgtgccaatgtaatttcatgcttttccacatcaaattccaattgacgccttttaagctgacgctcaagctcttggagctcgatttcctttgcggcttccgccctgggattgctcattttggatgttcgtgcgagaccaacgcttagtgaaatcagatgggaaaggtagataaagaggtaggagaatgtcaagtcggggttttggttagaattcatacatcgacgattcatcgtgatgtagtcccgtatccaatttgggtaacagctttgattatgtatgtttccgcggtcatagttatgcgtccgagataggcaaatgatgattaataaggtccctttattatgattggttaccataacgacaggtgacccacaacatccccacgtccctgccgcgggtggagatcggcacgctgacataatccagggcacccgccggccgcccggcaaaaaggccaagccgcatgcagtcgtgtgtcccgaagcttacgctttttttccctctttgacttcagttcttggttgtcaacagctttttctttgtcgcgaatatttacaatacgcggctccacacgcaatcgccgacccgactgctttttttattttatagcgaccgcgcataccccctgccatgtctcttttccaggccgcctttgactatgccgcacctgtcttgtacgtggtcgtaaatgactgacccacgggttcccagtgctaatcatgctcgtgtgcagccttataagctctccggtcacatcctatgccgaccaaatcttcagcattcatcgctcaagaagctcggcgggcttctccttagacattcctttgattatgctgatctcgtcgattctgaagtaagattccgatcggcagcgggttgatattcgaggcggcagttccatgttaacattattaggattttcttttggttcggcgagtactactcaaggactttgttaacgcaagcaattgtcatgatcgtggtgcagatcacgatgctcaaggttgcactcgataatcggccctctgccggggtgagaaatggaattgagcacacacccttcagcggcggtaactccgatggttcatcctcaagaccttatgagttctggcagtggaaggctaccaagccgtaagtctcggcatctccaaccactgcgatcaaagctgattacccattttcgaagatattggatgtgtctagcctacttcgtcggaatgttgaccatcatccaccttaccccggtcgctcaatcgcgattctatatcagcctccttggctacatcggactcgccgtcgaagctatcctccctatccctcaaatcctcgccaaccaccaatccggctcgtgcaagggcttccgattctccgttattgcggcatggattctcggtgacactatgaaaatgagttacttcttcaacagcacagagaccatcccctgggcgttcaagctctgtggtatcttccagtgtgtgtgcgacttctacctgggcttccagttctacttcttcactcgcaacaccccatctaaaacaccatcccactcgctctccaactcgctctctaactcgtttgctatcccacactcacactccaactcactctcgcacaatttccctgtctccgattctcactcccgctccaactcccaggctgcaagcgagtctatggagaatgaccgctggggtcatcacgagaaggacatccgcatggactgaaacactcgcatgatgaacttggactagacttcatatttatgtagataggtagcattggaaaacagcactatagatctgtaatttgaatgagataatgtgaatactatgatggtttcaaaaaaaatcatttcccggtgattctccgattgcgcgcctggtgaggggggggcttgccccgcgtcatttcgactgctctgctcgaacttctgcgccaacgtcttccccagtaacctcagatctaccgcttgttcttctccaaatcaatagtgcagctgtgtcttacacaatggccgacttgcccacagtccgcattggctacgtgcccggtacgtcagctttcccacagcttccgcatcagatgcaaaacagtactcccgtgtctatgctacagcctttgtctcaacgaagcctgccagtcacttctattgctctcgggcagaatatagctaacactaagcctttgtctactagagcactacctaaccccactccatctcgcactccgttccccggctgtttcttccctcccattcaaaatcgtcgcaactcccttcccatctgggacaggccatatgatcacatccctccgcggcaatgaaattgacgtcgccattggtttgacagagggatgggtcgcaggcttagccgggaagcagcaagcgagtcagacatccccggatgcagatggaggatacaaagttgtcggccactgggtagacaaccccctgcgctgggctatagtcaccggacgcaatcgggacgagatcacgggagtgtcggatctgaaggacaagagggttggagtcagccggttgggaaggtaagctatcaacatgagtcatgagcatagtatagcttggagactgacatgttggcctacagtggctcgcatatcatgtccttcgttcttgcgcagcagcaaggctggaaagctgactctttgaccaccgtccctctgggacccttcgggccgttgcgggatggtgtgtctggcctcgacgcctcaaagcccgaccaggctgcgaacccatcggctgagttcttcatgtgggaggaatttaccacgaagccatacttccatcctacagctgagagaccgaacccgccgcttaagaagattggcgagatcttcaccccttggccttcttggatgattgtcgcttctacagcgctgttccctaaccccgagaaagatcagcgattggagagtctcttccaggctctggatcagggaatcaaggatttcgaggctgatactgcacatgttgtgaagcttttgggtactggtgagctcggttgcaattatgtcgaggaggatgcaacggagtggctcaaggatgttaagttcactaatgccacccgcggtgttgatgataagattattggaggtgttgtcgatgtgctcaaggtggctggtgttattgactcggcaatgagcaatgatgaagctatccagcgagtcattgggatcaagaggtagcttccttggccctcgaagacggagaagtcacgatataaacagtatgcagagagatctgctcataataccatccagagctagattctatatatgccgcattgacgtgcacaatgttacggtccttgatatcggggtcctgtatgcatattcgtaatattcgtttcaatgggataaggtcaaggccccgccgctacttcattgctaagccatctctcatatccgagcctgattgtttcaaaaggaaacctcagtcggttggctcagggtagcgctgtagccattcgtcctttgtgtagagctgccctttgtcggtcaggaaagcagtgatctttttgttgagttctttgtttaatcgttagcaagaacttcactttgatatcagaggtctattacattctactgtcatttcctcctatgcttgcaatgagtaatagttgcaccctctttcacaccacagagagcaccgtcgataacacctttcagcgtatcacatggcaatgaaactgtaaccggtgtccatcgacacgaagactctcgtatgttgcactgagatactggggtaaccaggtcggatcgccaaaagaagatcaaaaacaggaaatgaggaagattagacagtaaattgaggatgatcaagagagctcagatatgtgaaaggtgaggtaaatgtgatggataggggagatgggaggaaaaagagagaggagaaggagaagatgcaggtgcgtttgacttgttaccttgttgagacgagaatctcgagaatagagatctcatcgtcaactactacttcaaaaactgctccaacaactgctttaactactatttcaacaactacttcgacaactgaagaccgagtcggggcaatgaacagtccttagatagacggtagactttcaccttttgttcaaacaatgtcttccactcaaaattgtcatcggccgaaaaattcgaaatggttggcttgcggacagcgatacaatgaacgcatcgcgagcgacgagttggcgaagaattttaccaaaaagtagaaccggtaagaataatctcgattcctctgggaaacttgcggctatacttccatgaatcgggctttcggtaagtgatccgatgcattcctgcaggaattgggtgttcgaaatgaactgggaatgccctcgtgtagcatttgacgctaacccaatggaataatactgatctagatgtgatatgtacaacatagtagttgcattctgcaggggaatagcatcgaattcatgataaataaaggttcggataagccgaagcctgaatgtttcgtactcaagtttgtcagttatgtaggttgtggtattgggtttgctgatatatattgaagagcattggctggttgaatcttctatacaacggtgctctacatttaaaattgttatttaaagaaacctagtctaaaattcagcaagaacttaattctttgacagaaacaacaagctaaaggattttagcacaaggtgaacagttcgtcttgaaagggccaatggagtatagttcgaccaactacaacataatgacgaccaccgagatgaccacccagatgacaagggatatgacgtgtttaccaggcataggtacggtctctatagcagcagagtcaaatgaggatggcctagaactaaactttacatccacacatgctcatccctcggtgcattcttagatctgccctcagtcccccgacaacaacactggaatgcacaccagggcgcgtgaaacaccccacaatccaatcaaaatattcacctggctaaaccacctacacaaaccatctattcgggaccaaggaatgaccccgaacctccttttcgattgttagcgtggacatttggatcataccatgcgctgcgggcaccgggtaagcaagccacttgaatgaggaacgcggacatttctttttagaaaataacaaggacaaatatgtatatagtatttaacaatgcactatgctcattcacgatgaggatcggtgttctgactctcctttgtcgtttccgtccctatacatcctccaatcccatatattaatttcttcctaatacctacttaatctaacgcgagcagatactgtactgcgctcgtcactatgcgccggtatctgtgtcttcttgcttggtctattttgctggctccattcggaggagcacaggcgaagctggacttaaactcgactagcaacatcgttgtttactggggtatgtgcttgttggtggtttggattaattcgtacttacatgagacatactgaaggccagaattcattcaatggaaagggggatcaggcacagcagcctcttgcacactactgcgatagtgagtgaatgatatatcttcaatgtggtcgttcaaactaacccgagcctctagatgaggacattgatgtaggaactaggtcatcaggaacgctttcaaaacaatgggctaacaaaatggcataggtgataccaatggccttcaatatgatggtcaacggcccaggaggcgctccagagattgatttctctgttaccagcaaggactgcgatgtcttcgaaggcacagaattaaagaactgtccttcaattgcgtaagaacatatcccgtccgctgaccatttctagacggctgacagtatctaggaaggacatccaaacgtgccaaaagaagaacaagacgatccttctttcaatcggtggagcgacctacagcgagggcggcttcaagtccgacgaagatgccaaggacggtgcgaagctgatgtgggagacctttggccccaagaaagagaattcaaccgctcttcgtcccttcggtgacgccgccttggatgggttcgacttggactttgaggccaatgtccaacacatggcccccttcgccaacgagctgcgctcactgatgaaggcggataagagcaagcaggatttctacttgacatcggcaccgcaatgcccctaccctgacgaggcagacaaagagatcctcaacggtcctgtttacattgacgctatctgggtacagttctataataactattgcggcgtcaacaatttcaacaccgacagctcaagcaacaaatacaacttcgaggagtgggacacctgggctaagaccgtgtcacagaacaaagatgtaaaggtcatcgtcggcgtcccagcctttacttctgcagctagcacggggtatatcccggcgtccgagttggccaaggtgattgaatacacgaagaagttcgacagtttcggaggtgttatgatgtgggatgccacacaggcatacgaaaacgatggatttatcgaggacgtgcgagaaagcttaggttctgcgaatgattccggttcgtcgtcgcccgacccggtgtcaacctcggcatctgcctctacgtccactgacccaacgaagacaaccaccacaactaccacaaccaccaccactacaaccaccacaaccacgactacgagaacgacgacgacgacgacgacttcgccatcttccaatgcacccgtctcttcacactcatcctcctcctcctcatctgcttctgcttcgcacaagggagctgaagaaacaaccaccaccaccaccaaagaacataagcctaccgttacgaccaccacgcaaaagcctgtcgcttccactacccaaccaaaaccgactactatcgtcactacaaccgcaaagcccaaggcttcctcaaccacatctgcggagacaactgcgactcccacctcgaatggtggccctaactcgccgagcgacgacgataattcagacgatggaccaaatgatgagtcgggtagtaatctcctcggctctatcctcgggaacgaccttctcggtctgctgggtggcctccgtaaggcgaacaaagctgctagcggtatcacccatggtctagccaacaatctctgacatgctcagcgcaactgcgcttggggttatgaccagaactgacatcgccataaacaaggccttagggagctgtgtttctctggcaatgaatgaacatgattgggccgttgagcgcatataaggaatttttacgatgaactcgaggtcaatttagacccgattcactcccattttgtcctttgaatcttttgccttctttatacccttcgatcttattactttcaactcatctaatgtcttgtttaccctttattcgataccctatttaatctttccctttgaagcttggaaaattgcaccattattgttgctttgtgtctttcacaaatgcgatcatacaatggagacactattggattggactcaaaatatatctataagctgacaggtatcatatggtttccatctatagtaactgattgaattcaaaagagataactagaggtatttgagcgccattaggatacttgtaagcagattcaacacattagagattaacatagacaccctcgtgctcttgtacgttgccccccgagaacacgccataataataacgttcaccatcgacaatacctaattaggccaggaacagaacgaaagacaactttcaacatccaatgatagtaagatccggacatcataccttccactcgatatcccaccccttcactcagcctcctcctcctccttggttgtagccaaggagaaccggcccttcgtggcgcccgattcctcgtactcaaccgtaacacgagacaagtgagcaagcaggttctcaattctgatctcacccttgtcgcgcttggaacgacccagattatcgagccactcaatcttgttcaagatgaagtatactagagcgataacaatcgaaacaccaagcgaataaccccagattcgaataacagtgacgatatcggtccagccatttgtggtctcaacaaaatggtctgcgggcttggttggcatggtttggttggtaaaccaaccgaacagacagtagatcgtagccaaagcgtcgacgccgaggatagcgactaccaggtggattgatggccatgtgtcgatgccgcgagtgacgaaaattagccaattctctgtgagtgccacttccaaaaagaggacctcttgaatagatccccagttttggataatgcctccgttcttcaggaacatacttcctcggataacccacgtacccatggcgagaagcacaccaagaaggcaggaaatgacccagattttgggaagttgccattccacaggtcgcagctcgaatgatgcatggtcataggcaactgcaacggtcgcaagatcggcgaacaatgccaggaagacaataagctccacacggatgctttcattgaggatgatcatcgaagtcacgaggtagatctcaaggtgcaagcagagtgcaatgcggtattgaatatatgacttcatgcggtgaaagatttgacgtgcgaccttaatagagtcaatgatagttgaaagaccaggctcgaggaacacgatgtctgctgcggactgagcggcttccgaggcaccttcgacggcgatgccacaatcggcttttttgagagatggtgcgtcatttacaccatcgccggtcatagcggtcaagtgccctcgttcttgtagcatttgtacgacttggtatttgtgttccgggaacacttcggcaaagccgtctgctttttcaacgagatcactagccatggcaccgctcaaaccgccgtggattagcttgtctgagttatacaccttagtacccaaagccaacatcttgcaggtttctttcgcaatagcaatagcatcaccggtaagcatcttcacgctaataccgagattctgcgcttcgctgatagtttgagcggtatcttctcggggcggatcaaacatagggagcattccaagcagagcccaatcttcgccttctttctgaacagcaataccgagagagcggaagcctcgatgcgcaaattcttgggctttggccttgtataagtcagctgtctccttagagcagcttgtcaattgaagcacggctttcggagcgcctttggtgcaggtataccgaataccgtcacaggtggcaatagtgacaatgcgttttgaaaccgggtcaaagggcgtgaaagtttcggttgaccaaccccgtcgcaggatttctcgtgctcttggatattgtctaagcgccaaaattgtcactttatcaatcggatcgagagattcaatattgtgcgatgacgcgagagcagcaacggcaaacatccagtccacgtcgacgccttcagctacataaggatcacgaatactcagtttgtttgccgtgagtgtacccgtcttatccgaacacagaatatcgacaccctaattcgctgtcagtatctcataatagtccaatttgacgcagacttacggccagggattcaattgcagtcagcttttgcacaatagctttcttctttgccagataggcagcaccgacagccatggtggtagtggtcacaacaggtaaaccgacaggtacaccaatgatcaacaaagacagagtgtagtgaagcaaagtctgctgaccaggtgaagcgataggaatatgacggaagaatccaccgatccatgcagcaaggatccaggccataacgagaatcaagagagatgttccaatattgtccatgacaagttcgaagtgaccagcgcctttagcagattgcaccatagttgcagtgcggccaacgaaggaagtggtcgcaggcgtttgaacgacagcataggccttgccacgcttacagccagttgtatagaagatcatatctcccatgtaacgatccacagctagcgactcgcccgtgatagcagagtgatcacaagctaaaataggatagccacgtctgcgagccttcttcgcctggtgttcgtctttttccttggccttgatctcgccttctccgccttctccgtcttcgcccttacccttatcggtattggttgggtcttcctcttcatcagactcggaccctccaccgagcataccctgctcttgaagctggttgaactcttcccagccatgttcatccttgacatcacagatgactctggagtccgcaggcacgacttgaccttcaccgacgatgacctaaatgattgataagaagtttgcgtataccaatgttccagctcatccaaaatagacttactacatcgcctggaaccaactcccgagcaagacattcttgttgagtactgtcacgaatgacctgcgcacgcagggcaatatcacccttgagactcgcaacaatatccgcagcctgcttctcctgataccagcccactgccgcgttcagacacaggataccaatgatcacaccaaaatcaatccagtcctctagaccagcagcaagcagaacagccaattccatgactatgctccagtcagtgcggtaaccaagggaggagttatatgcactcaccgtagagaattggtccttggaagtaagaaagaatcttagcaataggattttccttctcggatgtcatctcgttccaaccagcccgacgccgacggattggcacttcatggctagaaagcccctctcggacatccgtcatggtccaatcatcgggaaacttgccaacctccccctcgacctttttgacgcggacctgatgcttcttccacggggcataccagactcgtttctcgaccaattcgccctgttgttgatccgccgcagcatcccggaacgtcgaaacgtacttgacaagcttgccatactcgtccagactgttgtagtccccgctcagagatgcccgggagatacgtgagctccggcggcgagtctcggcacgttcggcttgaccgtcgccggacatgtttggctttataaatcagatcatagtccttccagtacaaacaggccagataggcacatacctttcaggagacgagatctgataacaaaaatgaatgcacgaagcaaaaggggaatatgaaaatgaagcaacaatgaaaagaaaaaatgaacttttccaatgttatattcgcagttcggcacctgcgggatgtcaagtattgaagatgagtgcaattttatctggagtagaaaagaagagaagtagctaggtagcgtagcgaaactatccaaaagaaatcatgctgacgtcgagccaggaagccctcgggagagacatctcgcatgtatgctcattgttttggtctttgtactcggtacttgaaggatgatgaaaccagggaccaaaagccggggaaccaggtctccaaagggacgagccgcggataatccgaagaactcccgctgggtcttgatgcatagaacattggttcgaccaatctagatgaagcccataacatcatagtcggctctaagatcgaaagaagctagtggtccaagccaggtacccgaattgacttcgagacaagggcattcacccatggatcgtggaagatgtttcctcggcgagggacatcacgacgatgggaaaggggtccaggtcgtgtgtctgcggctgtaggaccttgtgctatactgatgttcctacaggcatcaaaggtcttatgcggagatgatcatcgatcagtgcatccagctatggcgggacacgcattgggcgttgaacaccgtagctataataccattcgaagctatgaaccagaaagatccggggtgctcaatcaagcataggtgaacgaatgaactaggcccgtttctgctgtagagggcgagcggctgtccggatgtcaactgaagcagcaggtaacctgcgacgtcatgcgcatccattccgctgacagccggccggcggagtttacatccattccacgccaatgtttctgattcgtcaaaagaaatcatatggtcggaaatcgaaccgaaagtataagatggttatgagcaacttgctagcgagatcgttgcagtggagctcggccacacgtgaccctgttcagccctacacgcgccattacaacgcttcccagaactccccgaactaccctcccagagtgggtatggtatcgtccgatggcctttacctgcattcaaatcccgtccgaatgccctaacaaaaaaagcccctggataatgccaccaggtgccctttcgcccaaggtagcccttcgtagatgcacagaggatctatattcattttactgaacgcaagtggaagcatataaacaatctttcattcttcttatcatggatcactcataaaacatgattcaagcataactgacacagtatctatttggtcttgccggaaggaatattgaagaagactgcaggcttaccaggggagtaagcacggtccacgcggtagtagcccttacggtcgaactgaatgatatcgctctccttgagatcagcgacgttgcagtcggccagacccgcctcacggaactcggtgtgcaggttgaggaagtcctccaggacgtcatcctcaccgagagaatccttggtcaacaagtggtcaaagtcgaccaactcgacaggaactaggtcctgtccctcggtagcaagccaagtcaccttcttctcggtcttcttgacatcgccagccatgtgcagctcgagctcaagatcggtaatgatgccggtctcggggttcgttgtgatcttgcgcacgatggcattgccccagttcataagagtgatctcctcgtccggcttgaagagcttgacatcctcctgctcgagaatgatcgagctgctgtagacaaccttcttcataccgacggcggcgttcttaatgtgcttaggcttttgctcgctgtaaggggtagcagggccaccaatcacagtggtcttcacaacgttcttggtgaagatcgcggtgtggcgtggggcaataggatcaatgtatttcttgttggtagcccagataagaccccagtcgaagttggtcacagccttggaggggccctgcttgaggatgaattcccggagagcaggaatggtcataccgcggcgacggataccgcgaatggtggggaagcggggatcatcccagccccaaacgagaccagtctcgaccagcttggtgagcttacgcttagagaggagggtgcggacgaagttcatgcgggcgaaatcccacacctgcacgttgcgcagcttcatagtatccagcatccactggtactgggggttacgatcgcggtactcgatagtacgcagagcgtgggtgacaccctccatcgaatcaacgatagggcaggcaaagtcgtaagtcgggtagatcttccatttactgccggtgcggtggtgaggtgttgggttgcatcggtagatgaccggatcacgcatggccttattggggcagtcgtaggagatcttagcacggatgcaccaacgaagaccctctggggtgctgttcttcatatcctcaagatgcgccaagctttcctcgggggaaagatcccgacgcttgctaggcaatccgtcccatctctgggcagccatggtttctttatcggtatcatctgcgtaggcgtcgccctgtttgatgatctggatacagtaggcgtacaactcgtcgaagtagtcactagtgtaagtcaacttgttaggcttgatgcccatgagcgcaaggtcctccacgatggcatcctcgaactcttgcttctcgttcgaggggttggtgtcgtcgaatctagtacaagtcagttcagggtccttgattttgtttgctatttgtcttcaaccaacctcagaagcatagtaccgttgtacttctcatgcgcaaaatagtcgttgagaagagcggccttggcgtgaccaatgtggaggtatccactacattaaagcgaacgatattagtctcagatagattaaacaagaattgggtcccaactcacgaaggctcgggagggaatcgggtaacgacaccgttctcggtgttcttgagcgcaatgtcgtaactggcgccctccttagacttggccaccttcttctccttagcaactgcgttcatggattccacagcggcgggagcccaggggcaaagctcctcaatgaacctaaaccagcgggtaaggttcacaagggatcccttcttcacggccgcagtggcgacacgattgcctcggatagcaccccaaagggcaatgtcgggggtcgacagagagtatccgaccacgaacgagcgcatgaggaggtgagtatcaaggcgctgaagcacgggatcgagggccttgaaatccaggatggtcagggaatccaattgagagatccactcagtctcctattgcgaggaatagtgttagggttatttcggttccaaaaaaaagactcgaccgcggggtagtgactcaactcaccaccttggaatctttgccagtcaggaaagggaagtgcttagtaagttcctggatgacattggcagtaccaaagacagagttggaaccactagtgagctgcacgatggccttgtcgccatcctggagaagagcagtgtcctcatatgtgatgttgatcacgggggtgggacgggcctcattgatggaggtgacgatgagaaccgcaggcagagttgccgcctggttgccacgagtggccactttcaactcgtattcagacatggcgcagaagtgtagtgttaggagcaatgtgaatttctggcgggggagtcattatctacagtccccgtccggagccacatttctccgaccccgactgctttccggcagaaaacaattgcttcatccagccgatcagctcacatcaacgcttgccaacatgtcgtcctccggctcggtactgcccagtgcggcacgaggaatcctatcatcatgccggaatccgctgcgaaattcatcaatcgctcccgttctctcgactttccagcaggtccgaggtctcaagcacaaaccaaagaaggggaaggagcagcctaccaagagccgcaaagcaccccaggagttccggcaagccaatttgaaggatatgccgcagtattcactgtgtgatgctatgcggtatgtactggacacagatgtcagccaatagccgggccatcaattgacaccttcctttctgcaggtatatccgggccatcgaagtcggtcgcgaacccaccgttcaaaaatacgagctgcacatccgactgcggacaaagcgcgatggtcccgtcatccgtaacatgctccgattcccgcacgccgtccagaccgaatcccgcatctgtgtcatctgtcctcccggttcgaaagcggctaaggaagcgcttgctgctggtgccgttctcgtcggtgaacaagaagtgttcgacgccgtcaaggcaggcactattgagtttgatcgctgtctcgctcacccggacagtttgccggcattgaacaaggccgcgctgggtcgtatcctcggtcctcgcggtttgatgcccagtgcgaagactggtaccgttgtggaagatgtggctgcgcgagtggagatgctccgtggtggtactgtgtacagagagcgtgatgctgttatccgtctgcccatcgggcaattgggcttctctccagaacaattgcgcgacaacatgcgcgtgacccttgaccagattaagaaggatgcttccgcgctgaccgaccgtgtcaacaaggaggtctacgaggtggtgagcacttaattgatccttcttgtggaaaaatctctaacaacaccatcaggtactgagctcgacgaacggacccggattctcactcagcggcgagttccgctctgacgcctctcccccaacctccgccttggccggcatgtaacatactcaattttcttatatcctttggcgtgtacaaatttattgttttattaggaaaggacatggtgtatcatggtatcattgttgaactagaactttataagacgaaacgccgacgctatgtatgcaagccagtgccgattgccaatttccaggaacatgcacgttgtttttacagcttgaggttcttcagcgcggcaacggcactgacgtcctcacccataagctcgtagaggcgcagaactgccattgttctagcgtcacgtttgccctgtttaccacctgccgtggcctgctccaaggcagttttgagatccaggagcactgtagacttgatctttgcgactcgtggttgctgcgcaagcaggaagggatgcttctcgccgacccgggcagctatcgaggtcaaatagacaaatttctgcgcatgacgttccatcctctttaatgaaattgcaggtgtgccatctgctagctcataatcctcgctgtcttcactctcgccgccgtacaaatcggactctgtatctgattcgtccgatgtggcatgttcttgcgatgacttgtcctcaatcatcaaacggtgttccaactcctccacccgatctgcatagtccagcaggtctttgccaatgtcggtgttctttcgtagtcgccgcttttcgttcaacagctcttccacttcctggcgtcgcgcctcgaccttgtcccgtatagccttgacgtcgcgctggaaagaaagtacgccgacttttacaccttcgactttctcctctcctccgcggagcgcgctgcccaacgagagaaagtcctggtagttctcattgacaagatccaacagctccttgttcaagaattgctccagtccccgcaattcctgtcgcagatcctcgaggctttgatgtcggtttgtcaatgacgagaggaaattggccggatcgaagtcaggggcgaggaatgaggtgcgagatagcggttccgggaaggggagaccagatgggtcttcatcgaagtcggaggaggacccgtcggagtcgccgaactataggtcggttagacgaggtaccaatttgagtcacatgggttcatacttggaaccgattcatggtgcgttccgggcagagcgtgagcaatgatgaaggaacacttgggaaacgtggtggtgtctatgcctcgatataacttacatacctgttgagcgtgtcatcttcatgtttggaaaattcattatcagtttggctttgtggcccagtggttaaggcatcccgctcgtatcataatggtgcaaacgggggggtcccgcgttcgactcgcggcagagccatcctatttttggctttttttgcatagtgtacctgaggtgcctgaaccacactgacagctttggtggtcatcagggaagctgtccacccctcggatgatttacatcagacaaaacactcaacgcatgtcgatgaatatgcattgcgcatccgacgtggatacatgcgaaacctaaccctctcaaagtcctgtcccctcccagagcggggtcggtgtctgcgctgtctcctgcattacacgtagctgtgcgctaccgcaaccggtacagaagatggagtcggagacattgcccagtacaaggccttcgtcttccctacctcgacaagcatggccccgactacgatccctatcccatgcttctcaagttgtgcccgccgtcgacccctcacaccagacaaaccaacggtaccagtccatcgccgaagaccccaccgctgcatatcgtgctacggctttgcgccaactaaacggtaccccgaggcctgcatcccgtcctattcgagtcgataatccctctgcccggcgcttgtcgacacctgatagaggccctgtgctagtcagggcgtattcgggcgatgcgcagaatagatctacacgacggtctactatgccctcgcgtcggttcctctcgttttccagctcgaggagctcgcctcccacgcgcccgtcccagtctgatgtcatattcccgacggataaggacttcagtattgagagtatactgcaggccatcgagcctgatatccgtggcactctggattccattgctgagatttgtgggcggagcaagctgagtctttccaacgagtacgggagccacatcgcgcctttgggtgagatctgtgctccgtcgagtgcgctgggaccggtcgaggaggccgggccgagtgaggaacgacgtgccgatgacagcaatccggtcattgtcgacgaggacgctagtccgactgattcagctcaggatatgcatccattctcctttcatcggtatctggaaaacctgcggcatactgcatctatgcaggagcagagtggtacacttgaccaaataactcagcagccccattctccattttctccgggcatggactccgcagcggaaactattgtgcctatcgccccggtcataccagcgacccctttcacgcgcgaattcgcatcaagacccaagcataatggacgtgatctacttgcgaagaatgctgctgctggcagtggtaaacagcagtcatatcagatggcgacaccggctgttgtttcggaggttcatctagaggcgattgcaaatgatggatcctccgaatccaatattctcccgcagtccgctctcggcggggaaagctcgggtccggaaatcatccaatccctcattgggtggctgaagtgggctgccactatcgctgggccggaatccagtcctgctttgcagtccgcggagagccggctgcgagctatgcttgatcgatcaggcaattagggtctccacagtgccttgatcacgactcatgttatgagacatgataatgactgatgtttacgatcttgcaaacaagattcacgatactatcgacacatctcaacatggttttgtttctaacaggttatgtttgaaatgtcggcttgtagacttttggtagtatacttactgctgggtattttattctgaaatttgcctagaaatattgcctgggaggatcaaaagaaaatatccaaattattagcatcctacgtcatcaaaggatgttcgcaggatgccaattattcttccctgttgtactctacgtccccagaatgactggttttcgccacattgtttacagcaaaagtgataccaatatagcgagtttcaatttgactcgagtaatggaggctaaagagtgaagcctaggacaaaaatctccaagaagtgccatcggcattaaaagcccaaggcaaagttaagcggaagccttaacctcaagacgcttgaaaccaccatcagcagcaacctcctgctgaagtgcagccatgcgcttctgatcaccaataggatcagtagagtcagcatccagaccccaagaaaggaacttattggtgtagttcgcgacgaagtccgcgtccaagatgccaagtctctttccatagttggtaaccttagtccagtcccgctgaacattcttcagatcgcgcgagaagtaagcaaacgaccgctcaaagatcttgcggttgacatccgtgcccatgatcggcttgacgtcaatgtactcggcgtacgccgccgcaggatcagcgaggacgtcgtccgtggcgcgcttgacggcgcgcatgaatgcagccaccttctccgggttcgcggcgatgaaggcgtcgttcgcgatgtacaggatcgagcagaagcagcagcagcccagctcggcgagctggtcgatgcgcagcatctggacgtcgctgcggggtcggttctggccggcgagccattcttccagttcgaccatctgcacgttctcgagaccgataccggcgtcgattgtgccttggatgatggctttggttatgttcattccgcaccgcacggctgtgtagtcgtcggcggtcatgccgtagtacttggtgagttcgtcgatttggatctggggttggttgttagggtttgtttggaattgagtgtgagggagggaattcataccttgccgaactcgccaacgtatccgattcgcttgcctttcagcgagcggaagtcctcggtgataccgctggacttcaggtacacgactccggtgaagggctcgtcgaggagggagccgatggaggtcacggggaagttgcgggccttggcctagacgtggtattagtatggttggggtgactatcatctgcggggaatgtatacgaaccgccagggtgtgaatcatggccttgaagcccatgtcgaccttgccgcttccgatgatctcggtgacatcggaggggtcattaggctcgagcagagcgaccttgagaccttcatccttgaagtagcctctggcctgggcgaggtagaggggggcgtggtacggggtcgcgtgcctttgagaaagaaaaaaaacttagccaagtcgaactacaagatcgagcacgggaagcccggaagctcggattctggaacaatgtcagcgtaccagttggtcaaaaaagtgatcttgtcggtagacatgatggcagaaatatcaagctattgaaatacttcaattgggtcagcatgccaagagagaacgcatccagctctactctacccatgctgttctccgttcaacctatgtattcaattgaacggaaagcagcagtgtgagtagagccagacacaaaacacaaaacaggggaacaatcaaagtcacgcatgtcctttcgctagtattgtctagatcaagttttgacagtataatctcagaacagccagccagtcggtatgggaaaaagaaacccaacacactccaggagactggagtaggtttatagttctccccaatcgactggctggaccgaacacctgtcatgcgagggcaacgactgttatacgaacaaataccttgatccatctcttcatcttagcgaggacaaagtcctgcgacccaacggggtcctggacgtgcgcggctccattggagagtcgtaccgatggtagacgtgagtcgagttggattgaagttggattggagttgagtgtaggaatgagagaagatggaggggcaggaggggtagaaataccacgcagaaatacgatgaatcatacgaagtacttcgctaaaggctggggccggaataatcgactgtgattgatcaagttcctaactctatactccgtacggagtattcacgccgggttaggatgcaataggatgcaagtgtcaagtggatagagtcggagttcatccctccggattacaacggatatcctcgcaacgtataacttccatgtgattcagtttaattaaagaacaatcataggcttcagatgcactgctaggaaaagatcatataaagcagagtgattaaacaagtacagatgacgtcacgagcagagtgtccactccaagggccaattgtgaggttgacagctaagcgacagggttccaacaccctcaactagtctgtccgatatccggcgtcggacccttcgcggccgttgaccgatatactgtccagtggggacgatgagcgttcggccatcttgcgggttcgcagtgtgagggggaagtgctcttcgggctcttcctcttcactatggaatgtattagtatttgacaacatcaatcatacaatggaacttacggcaatttccaggcaatataatcctcagtgctcaatccctcgtggccttcctgcagagaggcaaagtcaccgggagtcatcatcccggagcgatcccggggagatccaggaaccgaaagcgggcgggagagcttctgctccgttcctccaatgatatcgaagtagtcctcttggccctcgaaggaggagggataagctgtaaaaaaagaattaatcataatcaccgacaacataaaaacgaactgcaacatacctcttctcaatgccagctgacgagccttgacatattccaagcccattcttttccagtcgagcagatcgctcaggcgctccgtacggttacgctggttaatgcgctggcgacgactcttctccgtgaagttgaacataaactcggtcagttggttgaccgagtcgtcaacgcccttggagcgacggtcgacgatgtaaattccgtaatcggacgagttttcaatcaattcctccatatagcaaccgaatccagacagattggtggtgatgctaggcacacccatcacggtacattcggccggtgtgtatccccacggctcgtagtaggaggggaagacacccagatgggttccgcgaacgaagtcgtcgtaatcaagcggcaatacggggttggcagagttgaggaattcggggtggaaaataaccttcacccggtcggaggagtggttgaacagctgaacgcgacgcagctggttcaggattgggtcctcgtggtcattgaccatgttgtgggtgacgatagggggcagaccggtgcgcttcatgccgaacaggcgacggcggagcatcacacgatcttgactggtgatgagatctttctcgtcgggcatgttgtcgccctccttccaggaaaggcagcgctcatacatgcgcttgccgatccccttctcgatgttctcgacggtgtcgcgcagagacttgacgacggcctgtcccttgagcgcttccactgtcaacgaagaggtctgcgcgggcataataatgaacgcgacgacagtcatcgttgacccagcggccttcagtcgatgattgaggcgggccagcccctcaatgaacatatcgacacccttgttgcggtattcgtaacgaccggcagtgaagagatatagagtattatccaggtcgaagtcgttgtggccgtagaaatggccacgaacgaaatcgttgatcttctccttggcctgggagtgcaagttctggaactcgtgcatggcagagaatttcttgacattcagaccattaggcagcacaccatcgggtttgcgcttcagcaggtgctcactctcaaacgcagtgatgtgcgacacagtggtgaagacatcacaggcatgagtagcagcgcgctcaatgcagtagcggtggtagattcctcgcttcccggcctccgcatccacatcaaagtactgaaggttattatagaaatcaaccgagccagcacagaggtaacgacccaataatgtcgcgtgggtggtgaagacggttgtgaggtccatatgccgcttcttggtcagtggcagagcgacaccagccaaccattcatggaaatgggcaatgactgcccggcgacggtcatgagcaatgtactacagcgagagcatggtcagtcatgcacttttgccatctccaacgtagacaatattgctggtacgtacctctcccaagaaccaagcgaccaggtatccaaagacgatggcctcgttggtctcattgtcaccagcgggagacgggatggccgaggtgttccaaagatcacccttccactcgtccagccacctatagccagtccccgtatcaatgaggagaactcggggagcaccctcgatgagccagcgaccgtagacgatgtcaatgccgcgctctttcatggactgaatcgtgtcccgcatggccgggttagacggcgagagctcttccacctccacagcagccgaagccctgttgagagggccgatcatggtgtaccgctcgccatactcagcggtggtcacaggcgctttggacttgagaaccgagtagatcccgcctactcggttcgccacctcagtagccacctcgaagagcatgtgattgcgcacatcacgcttgatgggttcaccattttcctccattgtgctcaaggccacagaaatcacagaaacacagaaaagcgaaagaaaaatgagacgcgagaatgggggagggttggacgcaacaaccttggaagagctcttcgactcggtctgtgcggggagaagtggaccttttgccttgggctcttctgggggaggctggggaggagtaggggggcaatgtcgatcggactgaagatgttgaagcgaaagggatatattttagagcagagacagcagcacacggagtacaacaattcccgttcctcgttccggtcaagggtttttctccggactggctgacgggtgtgaccacaggactttttgccgcgaagaagtctctgttagggaaatcccacccgagactgaggaaaagggcgtatgatgtgctcaggagattttatattaatctaatgtctatccatggatacaggtctctttgcttggtatgtaacagtcgtagcagtacccaagtggcatcgccatcgccccacgccgtgtactcgcctctctctccgttctatccccgatattcccctttctcctaggtttcgcccggtttttccgattattgggcacctgatctgcatttattcgccttcaatccccgtctccaaagctcagggccaatccaattgcagtttctcttcgggtctggggaaagctggagccatgatgtcatctcacattctactccactgaacggcgtcggagggacccgccggagcttgatcttctacaaatcgccgaccaagctggccacgaatggcttgagatggcttcaaccatctgcatttattggcggggaggacgcgcgggccatgttggaggggatgatcgtcttggcagttatccaattccctcattggcgttgagatatgcctataccgtatgacatggcagatgcaaactactttttttgtacaacactgtgttcctggtctctacctaggttgccccctgcctggtcggaggggaatatctccgagatcctgcaatgtttgacctacctcaaggatgcttccaccggggcagtaccagacaatcatgtccacgatgtttacggatagattctgcaaaagaaccccaggatgatgaagccgctttcttttaccctgctagctgcctacatgggtaggtagtacagcagttgactcatcatagtagagacacttgggaacaaagagcccatcgttgacagaatcatcaacaaagaacctcaaaagtcgcagacctctgtttgttcccatcctcattgtaactgagatggagtccagtcctcatacctgtagagaatgttgtgttacttgctcgaaaagcatcaactgaaaggcccattgatgtcgatctcggagataccagtataccagtccagagaaatataaaaagctgaacgagatgagacctgaagaaagacagcttctgcatcctcccgtccttcagcatctctctcttctgatcaacccgacttccgatcttcaatcatccgtctcattagacatgtctgagaagcaggcgcgcaagagggccaagatcaagcgttggttgagaagttgggtattcactccgctgggtaaggtgaggatcaagttgatcaacaagactgaacggaagcgctgtcgaagtatctcggaccgtgagctcaattggatcgttgatggatcttacgctgatcgatatccgtctcgcttttatcggggccgcaatggtcgtcagttatcgagcccagcgaggaagaggttcctgctcgagactgaggataacctatctctagtagagcttgtgtttcctatgtccacacggtcagggagttcacaacaccagccttctagacctggcttttgtgacagagtcgaacttgctgtgactaccgtccaatctgattatcttcatgacccccgtggaagctggcgagggggtgaacattctgcgctgggaagcatgaatccggacttggctgaattgagtagtgacggtgaaaggtctaagtcaggccccgtttgtgtatttgaggttggtagaaatgtgtacgagctttccgcagttaaggtaatgagcccaaacttacctgcagagttaagtggtggaaatcaatctgggcagtcaccttccctttatgccgagtctgacggtgagatggccaatttctctgtggttgaagagctgcctcctcagcttcccgatttgtatttcatccatcaacccaacccaccattatgctgtctcatcagttcagctcttcagaacttgctctcaccggtccctttggagaacggtatctgctcctgtgtaaaattctcacacagtattgagccatcgattcaacatttgtcctcggatatgtcacggtcatccatcaagagggccaagccccggatgaccaccgcagaagtcctcattcgctatgcaaagaaaagacgagatgccatcataaacaataggtacatctcaccatatgctcctttacaaccacgaccactccgaattcggaaagataataatgtcaccagcgaaccgcagcatgatgtcctgtccgccattcccgtggagacgtctcatgaggtgacagcaccagtgcatcgtccacgatacagtctccgccgtaagatttttcacggcgcattacctcctctacctccttcggcacctacctcccgtccattcagtggttcatccattccatcttcttcgtctgaaccagcaagacttagctctcaggcccttggcatctcatccactcctgcatcttcatctcgaccagcaaccaatggtcttccacagtaccctgaccggcgaacatcgatgtgcggtggctgcctagaaggacgacaccgtcctctccacagccatccatatcatcgccatggcgacaacaacccgcaatctggaagtcccccactgccatatccacttagcccgcgggaactcctaaaccgcctcccacctggaattgattatgttccaccttcgctcatggctggccccccccgccccgccccccccacnnnnnnnnnnnnnnnnnnnnnnnnnnnnnnnnnnnnnnnnnnnnnnnnnnnnnnnnnnnnnnnnnnnnnnnnnnnnnnnnnnnnnnnnnnnnnnnnnnnnnnnnnnnnnnnnnnnnnnnnnnnnnnnnnnnnnnnnnnnnnnnnnnnnnnnnnnnnnnnnnnnnnnnnnnnnnnnnnnnnnnnnnnnnnnnnnnnnnnnnnnnnnnnnnnnnnnnnnnnnnnnnnnnnnnnnnnnnnnnnnnnnnnnnnnnnnnnnnnnnnnnnnnnnnnnnnnnnnnnnnnnnnnnnnnnnnnnnnnnnnnnnnnnnnnnnnnnnnnnnnnnnnnnnnnnnnnnnnnnnnnnnnnnnnnnnnnnnnnnnnnnnnnnnnnnnnnnnnnnnnnnnnnnnnnnnnnnnnnnnnnnnnnnnnnnnnnnnnnnnnnnnnnnnnnnnnnnnnnnnnnnnnnnnnnnnnnnnnnnnnnnnnnnnnnnncccgccccgccaccccccgccgatctgggatcggttctcccccaggattggttggtcctcgggcgttgaatcgtgtctccgtctccctctcagacaccgcacctgactcgccttgggctggccctgtagactccatggcgttctattatgactctgatgaggacttgcctttgcccgtcgagtctgatcacgccgagagtgttggtccatctggctttgaaatgtgtctaattgcgggatcggctgctcaaagtcgtagataccgttgagggacaagttggtgccgacattcagtgagggtcgatctggaatacccgcttcttcttattacgtttccctaagttggtctgtgtcaatctcttgtcagactcttaattatgttagaatcaatctttcgggcatcagaaccatcaaaaatcataaaaataaatgataattccataccaaatgtatcttttcacataatctttttggatgttgctggcagacaaggaaaaaggaacgtatacaacgtagccctagtatgaaaacggtcgcatatatattccacgcaatgaacaaaacttgaaagttagttacctcaccacaattctttaataatatcatttactaatggttctctcgatccatgaccttccattgaatttccagacccagttccaaggcagttgagctaagatcttggtaccccaactgccatgaagtcatactctccactatgagttcagaatgttgtcacggccgaacacatcgaaaaccaaatgactataagtataactatcaaatactcctctttcaattactacacaaccaaaaagaaaaaagaaaccattctacattaaactacatttcacatttccctcctctcctaccaaaatcaaccaaaatggtccgcggcgcagaatacgacaacggtgtcccccagagcgacaaccctatcgagaacggtcccaacaaggcccacggaatcggcagtgaggtgagatgcgcaccaagtaactccaattgaactctactaacattccacagcccgcagacctgagccgctcccacaaggctgcccctttgccagagcagactggctccggccgtgaagtccaccctggattgcctaccgctggatcggcgcatccccaaggtggtgctgcacagcctgtttcccttgatgagaagaacactgctggaaaataagtgcggtgattttataatatgcggatggcgatgaccctgtatgagtatgatattggtgtttttgatattttgcatacaacatacgtattggataatgcctggagattgagacctttccctttccgtatcattgctcacctcttgccgcttgttgatcaagtaaactgagcacgtgactgctttctccatagtcttgcaattgaatagttatcacaaccacaattacaaatcaaacatagtaattaaaaaaacgaatgtcacacccatttcaagcatcttggccagcgggcattcccgaggttcgcctgtatccgaccgatttggactcggaagagcttgcggatgaggccaaggggtggttgctgttcgtacggctataagactgtacccttcttcaatgataaggttggtatcgacgatttatcttactttctgtaggaagaatcccaacccacgtcaacccccgcagatgcgctgcatcaccggcgagccctaatcgagagatgggccactgccagccagggattccgcgaggtccgtatagttataccctaatgttaatgccttttctaatttactctcttttccccctcctccgttttcttaaagtacttgagaatgaatagaaaaaattacgaaaatacaaacgagcagtacagtcctactatcaacgtgccccaggttatgactcggctctcgactaccctccgtccaacatacggagtacggagtagttagttgtcaattcctctgttggcaaccaggctggtccgttgatatatttttccgctccgagacgaagttgctggtacttgagagcactggacccccagtcgaatctgtcaccgatgtctatcatacatacgtattctacatcctacacggcccattgtatgtttcaaatgcgaaggaattgcctgtcgcttcactggcttcggccttcaattagtccgatatgtttcgcggtgctttttggcccttgtcttccttgcacagcactagaagccttcgtactgcgcgatattttcatcaggtcacaacatatttcgttacccatgatgcgagagggaatttagttaccaggaaggtgcctattattattggcaatccgggggaaacttatgttctgattgaaacagggattggcagtgcactccgtgccgctagccccttacatttccttccgcggctagtgctgaagatagatgcaaacttacattttttcatgattcacaacactttgggtttggtaagttgtcagcgagaggtttatatagccgatgctaacagtttattaggaacatcgagttattcccgtctctatatcccaagccaactccctcgtcaaacagaatcaaatgaaagccctgcaactttgctcttagacggagtgatgcacgagatagttctagatgggacttttgatggtacatataatccagctacaaatacttcccgtcttacgcatgctcatctataatgcctatccagcaacttttgcggagaacgcaagcgctactgcacggaacctgaaaagcgtacttgacaacctgaaggatatgtaatgttaagcttgattttactatagccatgtcgggaatctttcgatataagaccgttgagacggattggcaacctatgactagaatcccgagagtaaatgagaaatcccaatgtcatcgagactatcgggtcagtatcatcatagatccttgaaattcacaactggatgtaatattttctaaatttgtctgcaaatatgcacaagtcaatccatgcacaacattatgattcagttatcaatgtccccatcaaggcaagcgtggcggacacaacgcggtcttgactagacaatgtacagtagataaagtgatacgaataatcactaaatcaacaacaaaggtttacatcatgatacacctctttccctcccctctagagcaagaaccaaaagaaaggctaagacggaggattaacgtgcaaaacaatatcaatttgtgactataaatcccacttgaagctcgcaaacaataggactggatactgtgagccgcctagacaccattcaaaacatcgatgatgtcgacggagagtaagaggctagtactcagtagctgagcttctatactccatgatgtctgcaatcaccagaccaagaggcgatgccacagacttgtaataagttcctaactgttcagcggtccactgattggtaacgacggcgatgtgagcattttctagccccttgttgtgtaggtcctccgcgaatggtaccttttgaaagtagtagcttggaagactgtcaagaatcgaagcgtttgtgtagccattccgaaagaaagcaggcgagagggaaatgagttgtatgttcaaatggagttgtgatttccaataagcaacctcactgataaacccttaaagacatcagcagaaaatacggtttgtaggagagatagtaatcgacttcaatgaaagagaagacgcaaatatttatagtcctctcagatgctacctatccaaggctgttgggttacaggaagactcgtcctggtgttctccgggagtattggattagaacgccgtatttcagcaagagagttaaacttacctaggtatgcgtacgcataatgtccacttcatcaagggcaggtgatacaattttgatgagatggggcaaatattagaatttcatgctaagtgaccttagatccatctcttgttttctcatgaacataccgaaagggcgccaccaaaatttcaaggcgcacgatactgtaggccgatgagaaaaagcctagacctactgcatccgctaaactaggaaataagctgcccaggtccaaggactgtatctgactctaagctacgtcgcaattttgagacacattgatctgtgtctggtcttagtttggaacatctatccttgacccacctctaagggaatctaagcatacaaactcaaagacccacaactcagacctcctatcgactccactttacgatatagaacactaaaatgcggggattcgcctagatcttatactatgtatatcgatactatcgataaagacctaaaagaaagcttaacaaaatattctattcctcgttagaatggatctcctagtagccctaaagattatcgttgcgagtcagcctagtgagtgcggttccagggctttgtcctgtaatgaaattgttaggactagctactagcaaaacgtccgtttgcttgcttccaagagcttatcttctgtttactatgtacggtcgccttagaagtcactttaaaagagaatgtgtttcaagctatgcagtcggttttccactgtgatgccaactgaaagtctctcagaggacggattcgtggtgcaaaatgggcaaaccgggccatttatcttttaccacgcactaactggggttctcgtagctgggacatcatctatattggtatgaaacatatttcaagttttcttggataagctaacttctggtatcggcagctagtaatcaagtcaacttttataacgagttcaacgactattcgatccttacattttttacaataaataggtatagaactagaaatattgtcgttgggatatgtctctttgattgtcacgctcattttagtgaggagatcgatatggagtgtaacttcaacttgactaaaccatcgcttactacacctgataaatctagagaacccctaaaatggctgtgttaggatattagagatcacccatccccgtgatctacttcctagtaaggcttacatagatagatgcttcgcttctcatatagaacttggagaaggacgagggctatcccagtagtcaattaggaacattccaatgcttcctgaatcagatatggcgttcctatacaattatcaagcatatcatcctctaagtacgagttgtagattaataacccagcctcgccattaggcaccttatttgaccagaccaaccccctaagggaatattttgtggaggcttgtactcgacagttgcgagaatggtgctggttctatcactaacgcgatggattgccacgagggatggctcacaattgcttttatattggagattttgaggtcaagtcactctctatgagacacgacaaagagcctctgaccgcaacataacaaaaaagatgaagctctccttttccctacgcccgatgaacatgacgtattagcttgatgaaatggggggggggggggggttagaaaaggggggggcggnnnnnnnnnnnnnnnnnnnnnnnnnnnnnnnnnnnnnnnnnnnnnnnnnnnnnnnnnnnnnnnnnnnnnnnnnnnnnnnnnnnnnnnnnnnnnnnnnnnnnnnnnnnnnnnngtgtgggggggggggggggggggggggggggggttagaaaatgagggcgcgatgcttgaggccggtctgagtaatcagagagcgtccaatgagcatctacatagaatcagtgttcatacacgtgactggtctgagctcatctcattaaagcggcagcccagataggaaagccccacacataccgccgtgaatcaatgatgttattcggaggatcaacgacaatatgcgcattctataaatgcgcaggaagtggtggttaaaccctttgattaaagctaagccttaggaagtgataaaaggtaaaatataatccaccttgcctagaggcacgccttccttgcgcaagatgccataggcagtagttacatgaaagaagatattagcctgcataatgcacgcgaatgcaatcccagacaagagttgtgtattacctcccagaggcgtggggctgacggtctcgcaatgttcgaggatgaagtctttgtcaaccgtgtcgagggcctggtgcgccttgtcgatgcgagcgtacatttccgcaaatgtgtagaccacgtcctgactcgtgtcatccgttgggaatggttcggctgtcagcttagccagagcgagccgtgtttgcatggttgccgcgaacacttggtagctaagtgatttcatgtcattgtggagtcgacaggacggaagattggaagcgttgggcgcctcctcggctttgtgaagaatatgcgaaagtgcagttaaagctcgcttggtctggagaacaaagccctcgtaaattgtgtacaccattttggctatcggacttgggggagtgaatatgaagtttgtgtgtagaaatatttttcatctgagacctggggaggcaggttggttatgtagcgtacgatcgtccccaagaacgtgagatgcgcagtgccttgggtagcactaactagttagttatgtgatacgtaccacgtaagcactagtgcgtgtagcattgatctaggttcacggggggcctcgattgagtccagtgatcgagatcgggtgccgtctctacgccaggcaaggatgaaacatgaaaaggatctatataggaaccgaaaatgatactgatttcctggaggtctgtatccggttggttgcccttgaatcttgagtagtgaatgtgaatactcttttgccgaagtactgagagcccgtaggtccgtgcatgtcataataccctcgtatccaaggtctcagataagaaattatttcatagccctcggacgagaccgcatgaatgtgttatcctccttctctccttatccgcaaggagagtgaagtaaggcacacgtctaatgcgtaatactacatatactagaatgagaatcacggctcttattcatatccacaaacgctgggatagctctataaatgtggtggacagatatgtggtagcagcaaatgacaagtgtacggctcggtaatgcgtgcgcagggaataacggaacatgcagaaaaaaaattatatgtttaagagtaaatatggaatgagaatggaaattaggacttcgtagaatcagagcgatcgtcccgatcttggagcttctcagtcgccttctcggacttattggcttcgttggtaatggtaatggtcttggctcgcacaacctcgaggagcttgtcgccaacctcgctggcgccctcgattttgctcagtttggttcggaaatgctcgacatcggcttgcattctgtgtgttgttagtatcaaccatgagccgaattcgagtactgaaactaacctcttttttcctgcctccgtatgcacgtcggcctcctggaaggccttcgtccattgatcacggtagctgttgaatacgggcaccatgatcatgctaactgtcatgtctggaagatgcttgctcaagacgcggtgtagagtgcccgtctccttggccaatgtttccatgtaaggattgacagcaggagctgctcccttggaattccagtcgatcttcttcatcgcgttcacgtggaccgaagaccgagagctcataatatccaccagcttctcgtggatgccgctctgatgctcctggcatagtcgtttgactttgtcaaactcggccattaatggatttgtctgtccatgccgacggacaaattcccgtacatacgggactaaagcaataacaaagctcaacgcttgtgacgacaacgcgagatgcttagttgtgatgttcttcaggcctgcactacgcgtagcgccggccccaagaatcaactgcgatgaccgcgagttgaacagtttcaagatatctagtagatgcggcgcaatatcctgaatcatgctaggaatatttgacatgaggaactcgaactcctcaatgctacgcatcatggcaacagcggagtcaggtagaatgtatttttgctcgtcgatgacggcactgcgaaccttggacttgtctgtcccattttcagcggcagtaccagcaattttgccttgctcatttgtaggatggggaatccagattttggagacctcaacccaggcctcgatgtctttggtgctggcatcgaggatcctagtaagaatgacgttttcggcatctccaaaatcgcgtgcatcccatcgatcggcatccatgacattgacaatttgatggcgctgaccatcaccgaaacgggtaatgaaatcgcggatttgatttccgacaatggtctttagagcagtaccactgcgtcccgagatggcctcacattcatcggcgaacaagcggttgagagtgaagtacctgaggaattgctccttggaaagctgggcggtctgttcagatcgtaccttcaatacctttattatctgagattgggcgatgtcaacggcctgaccaagcagactagacatatccaaaacctgtagaatctcatcctgggccatgtccgaggctgtcggccccatgtgtggtgattttatagcttgatcgatactttgcgggatggggcttcgtggtggtgacttgacgccggaagtgggcgaattccccaagccgctagcgatatctagaaggactttgacttggacgctgagtcgcctaagcgattcgctaatcccggtgtagatattgatcaacattgtataagcatcatccgagtcgagagcacgcagattacgagcaagaattgatgatttctcctgctggcttagctgatgaccgccatgtgttgatagcgataccatagattcattatcatcatcactagaactgggcaggtgtttgcgaatgaggcccttcatttctcgtaaaacagcagttttgaaagaagttgctgctggcatcgtatagcgggcacgtgcgagtccgttgagctgggtgttcaattgtgatcgcaactcgctattgaaatccatataggcaggcgataccgatactccagaccgttgaccacctcgctgccgttgaaatgagtttccccagcgctgcaatgtcacattcgatggcactgtttgaacatgctgtcgtaaatctcccaaaaggtcattcaagaaccgggtctcatagcccatgccaatacgttgacggagctgtgccaggtcgtcagatgctccctcaagggccttgatacctcgcagatcaagaaggcgcctgggggcaccctccttgtcttctaaagtggcgcgatcggagagcttttcaccggccatcagcttttcgacttcctcgagtccctcggcagcttcctcaatgtcaccctgctctaccaatccttcgcaccgagagacagattcaaccacgtcccgaagctgagccacagcagctgccaacattcgtacattttctcttcgccgtctcaaattgacaattttgagaccgccaagagccatttctttatcgattttctgaaggtctcttctgagtacttggatccggttgaccgagtcggcggcttccgcgtgcaattctcggagagatcctagggcagtgaagaaggatttcgaggccgttgagatagacgaaataagatggatctccacggtatccatataccatgaaagcttttcttgtagaatagcattcgttgccagtgcttttcttccggtttgtactggctccgcaaccaatccattggcctgttcatcgtctttggtgggcggtctcggcggccgaaccacatctgatttctctgatatcacatcgaacgtacggggattttccagatggaagtcctcttcgaaataaacgggaggtatagtggagagaggagttaccgcgggggcacgtccacggccagtggaggggcgtcggccgcgagtatcataaggcgaagatgatcttgaagtagtcgagatgactgaagacctccgctcgagagaccatggcattaatgaatcgcgatcagaatctggcctgggagatttagcagcctgcgccggtagtgtatcctctcccgcgccttctttcggtcgttgaaatacatcgtacaaagtgcccacttgcgatagatatggctggaagacctttggatccacgtgcttaatattggtcaaagtcacaggcgggatatcacgagaggatggaggcctgaagctggcggaggatgtggcgctaccggtcgtcagaccggtgcggatgatcgggggctggaggagtgttgaaatggctacatgggcgttaacacgtcaatcatcgagcaattgaggattcccaaggtcacaaaccattctgcccagactctgcgacagactctgagattgagccatggtagtgagaagagtctaggacacctcctatgctcacgatcgagctcgcggttgatcccctcctcagggggaatcgctgaggagccacacgtggtgatccaagctgacttgttgaataagaaatcgaaggcgacgagaccccagaagccaagctatcaattgattttcgtggactggttgacgacatggctgtcacagccggatcggacagccgatcgttgagatgttctgtgttatctgatcatgacagtggataaactcctgactatagagcgctggcaggctcaggtacagggttcaatattgatcgagtcagcttctgcgattcgcaattttggtgcaagatcacttgggtcctgtgtgcagaatgactgatgtggctttgtttccatcaagctggtaatctccccaatcggccaatgcgctaacgccgggcccgcggttccccgtgctgactcagacagcacctgcctcaggcaccagctgactcagaaaccacttaacgcgtgaaccctcgacgcgtcgcgttggttccacactaaccaaaagttcttgaagcctcccttccgccaaatcatcaacccccaacttgcaatatttgcggtcctctacactatggatagacgcaccccctatactttgagcgtccttgcgcccagcacaaatggtgccgatgaagatcgcaccactattcaaaaccgccttcgggatttcgtgctagaatttcaactggataatgcattcgtctaccggtacgcatcccacttccttgagattccaatgtaggctaatttattattcaacagtgaccaattacggcaaaatgcacttgtgaaacaattttactgtgatattgatattgcccatctgatttcctacaacgaagaattggcccacaaactcaccaccgagcccggcgatatcattcctcttgtaagtttcttatcccgccaatcttggccctcgctgactcgaagtagttcgagctggctctgaagcaatgtactgcacggattgtctaccctgggcagcgagatatcatactaccctcccaccaactgctcttacactcctcggcatcgcacatctcaatccgtgatctcaatgccaccaacatctcccacctcgttcgcatccccggaatcgtcattggagcttcaacagtatcttccaaatcaacaatcattcacgttcgttgcaaaggctgcgactacagcgagaacatccaggtcgatggtggcttctctggcctcacgctgccgcgccgctgcggtcgacccagggacgacaacgatcaacccaacgagcaatgtcccttggacccttacgtcgttcaacacgaaaaatgtcaattcgtggaccagcaagtcctcaagcttcaagaagcccccgaccaggtgccagtgggtgagatgccgcgacacgttcttatttcggccgatcgctaccttgccaaccgagtggttcctggctcccgttgcacagtaatgggtatcttctctatctaccaagcgaagggtgttaagaaggaggctgcagtggcgatccgcaacccctatctccgcgcagtgggaattacctcggacttcgaccagacagcaaagggaaactcagtcttctctgaagaagaagaacaagaatttttggaactcagccggagacctgacttgtacgatgcacttgctcgaagcattgccccgtctatctatggaaacgtggatatgaagaaggccatcgtgtgtctgctcatgggtggctcaaagaagattcttcctgatggaatgaagcttcgcggtgatattaacgtgcttatgctgggtgatccaggtactgccaagtctcagcttttgaagttcgttgaaaaggctgctcctatcgccatctatacctctggaaaaggttcatctgccgccggtttgacagcctccgtgcagcgagatcataacactcgcgagttttaccttgaaggtggtgctatggtgcttgctgatggtggtgttgtgtgtattgatgagtttgataagatgcgtgacgaagaccgagtcgccattcacgaagctatggaacaacagaccatctctatcgccaaggccggaattaccacaatccttaactcgagaacgtccgtactagccgctgctaaccctgtcttcggtcgatatgatgatctcaaaacccctggcgagaacatcgatttccaaaccacaatcttgtcccgtttcgatatgattttcatcgtccgcgacgaacacgagcgtggccgggacgagaagattgctcgccacgtcatgggtgtgcacatgggtggtcgtggtctagaggagcaggtggaagccgaggttcccgtcgagcagatgaagcgctacatcagctactgtcgcaggcaagttgacactcattactgattccaactgctatattcatactaacatcctgtccagtcgttgtgcgccccgtctctccccggaagcagctgaaaagctctcgtcccacttcgtctctatccgaaagcaagtccaccgcgctgagattgaatccaacactcgatcatcgatccccatcaccatccgtcaacttgaggccattgtgcgtatttccgagtccctggccaaactttctctctctcctatcgccacggaagcccacgtggacgaggctatccgtctgttcctggcatccactatggacgccattacccagggtgagggccaaggtagcaaggaactcatggagcagagcagcaagattgaagacgagctgaagcgtcgcctccccattggttggagcacaagcttggctaccttgcgccgtgactttgttgatggcaagaactataccgaacaggcacttaatcgtgcactggtggtcttgcagcgacgtgacaccatccagatccgttctggtggatctcaaatctaccgtaacggagtttaatctgtgacttattatgattctaatgtgttctgttgatacacctgatatgtgttatgggatgggttgtcgattctgcgcatctgtcgatcttgtaaggcatgggagcttgccagtggtgttgggcgtgttttatattgggatttgacgggattctcaagaacaattgcatatttatttctaattcttccaagaatactgtataaaacgtggtatcttccctatcgtgtgtcttagcttcccttttagacaaaacccgtcactaacgccagttccctcatcgccttgaaccactgggaacgaatgaacatcgtatgaagcattgttcacgatatatgcacaggaccaaggagagtacttttgtgattattatcatgtcacttggcatcggtacggtttcccctttcaatcaccaacaacaattcattgaattcaaaaaatcactacacatatctgcagttttccccaattatctcttcatccagtctttctaaatgagtgcatgtaagccctacgacgattatgcctgggcaataagctcccagatctggggcgactggccaaaacttcttcgcactgatggggacttctacaatgacattggagccattatttgtgaagaatttagcgatcttaaatgtgccctgttcgatttcctcaacacaggcggtttcagtacctgcttcaagatggattcaccaatgattccggcgctatcatgtttcctgaagaaaaagtccggaatgaagtctccatcatgcaatttctctcagaaaaaacttcagacaagatcccaatcgcggtgccttctatctttcgctagaaaaggacaaaagagagtcccttagaactgggtccttttatcatcatgaactatatcccccacgagggaagtatgggtgatcttcttgagacgccaggacgccaaccaggacaacgtccagtacttaatccggagctcaatccgatgagactataagcgctatatggaaaactagccaacatcattctctcgctgtctacactttcttttggccggataggatccctttacaagaatgccgattctacgtgggaagtgttacatcggcctctgtcttactctatgaacgaaattgtgcaattggggacgttatcccgatcgaagctaccgatcaccacgtacgataaggcgtcatcgtactttgaagccctcgctgagctccacatttcacacctcagaagccaaaggaacgaagcggatatcgaagaggacgtcacgacggatatcttggcggatgaatttcggcgcaaattcgtggctaggtttctcttccgcaaaattgctcgagatcaggagcagaaacagcaatggatattacatgatgatggcccatttcctgtttggtatgacgactttcgaccagaaaatgttctagttgatgaagcggaaagcatcgtcggagtggtggattgggagtttacatataccgccccagccgaatttactcatgcgccaccctggtggcttcttctcaaaaagccagaagattggcttaaaggccttgatgagtggtccatggaatatgagaaaccgcttcagatctttcttgaggcaatgcggaaagccgaagacgaggcaatccaaaacaaatgactactagaaggccagcggctatctagtcggatgcgtgacaattggcagagcggagacttttggatcatgtacgccgcaaggaataattttgctttggacacgatatattggcaaaagatcgatcagcgattcttcggaagcacatgtgaatacgagaatatctgcgatgtatggcggaagagactccatctcttagaaccagaagagatagagctcatggaagaatatgtggatctgaaggtcaaagagagggacataactttcgcttgggacccggatgagtacaccgtggaatggatcaagaagatgagggcgatgagaaagacgaaggatatgaagcagaatatggagagagtggtgaaggagtgggaggaggagctagatagaatggcaaagatggagagcaagggggagataaagaggatggagatggggtggaaggaggtgataaaagacatgaaggagatgaagaggaggacggccgcggagtgggaggaggagatagagaggatgatgaagatggagaagaaggaggaaatcgaatagcttctttagacctgtcggaaacctccttcacatcctcttcttcttcttccatgtagtgaatttagttcccttaaaaatcatattttcttccaggtgaatgcaggaaagagattagaataatgctatggtgaagcgaggtgatttatgtccggactgcattcattccaaagttactatccgatctagacgtgctgcttgtctgtattcgagagggaccgaggtcttagtaggatatcatatagggtagatggacatacacataccaatagcgtaggaacagtcctaaatagttgccagctatttgagccttaatgccatctgtgtgataactccgccttctcgtcccgtcaacatatcgattccatttcttgactagaccgcgctagcctagaacctggccactcttcatagggtaagaatcgaaatcaaatggagcgagctccatcggcccttcgagagctatgcaatctgatctgatgaagcggatacaatgaatggacgtggtgtagccacgtcggtaagtctgtttcggcactcgaactacaaccagtgggacaaatgctaattcaatccacaatatggagtatgtttcacactgatattgcctacaaacctgatgaatacttatatagaagctcattcatacccgagacatatatatccaactcgaaggatctcaacggacttggagagtcatcaactcatttggaccgctgcagctacttcaaacatcaatgccattaccactgctgatttggtacaatgtcttatcgaacggaagtttgagctgtttgacatcgacggtagcccagccgaacggcttggctattggatctcgatcagggccggaaccaaaacctcgagggcctggttgctaatcgcttcacccacaacatacctataataccttacctcctctttttgaccaacctcatcgacaccaagaataacttctgcgtcaagccaggttactctggatgcgatttgccgaactgtccaacatgccgcgcacgtgatgttggaatgactaatattcggtaaaaggggttttaaccaaatgttaggcatttcagcagccgatttacccctcaactagcgagtgtattccgtatgtacggaatagcacggtgaacctctattttttggcttttctctcccggaataggagacaaaaatttgggatgatgcgttgtcaatcttgacatgatccacctcagcccctccaaaccctccaaaccctcccaagtcacagggctagccttatccagccacaggtcccctatacgccacttgtgaataaccccttcgcaatgtcgactgccaagaactgacaacatgaggctgcatccccaaattgacttggctctgttcagctccacattgtccctattaggcaccagcgtttctcctcggtctattcgaccttcattggccatgtgtggcccacgtactgtggctgtcattaaggctgtcacgggatcttgcatccttggcgcgcatgcacagtgcaacatcaggacatgtcgctcgatcctgtggctggggaccgtcggaggtgtcgccatgcgccacgataactgcacatcaagctgatttgctctgtcctcttttgaaccggagaccccgccaagatgacagcttggaatgtttacagtgctgatccacccactgacgtggacgggcggtgtagatggtcccgttctgtcctatccacagctgtccaccctggaaacactaactcgctaggtttctttgtcctaaaaagcctccccgcttactccgtatacggagtacaatctccccgctttgccaatgccggtcgtcccaatgaatgctccactcgggccagctgccatggcgcaattgaggcagtgcgacgaatgagtccaggacaagtgtcggacaggaactgggggctgctgcatgattccttgtgtaagcccgtatcgcaattcggggtgtattgacctcgccgtatggggtatataaggacagtccccttccctgaccacttctgccatccagaagtttatgatacatagtctcttacactctactctacattattctctcccaaatcgacactatgagcttccacgaatctgcttcccacatcgagcttgtggatggccatatcctcagggctcttcttcgcactgagaatggtgatgaggaggagtccactatcgatctcgatcaccacattggaaacgacaatggtatgttgctctgtctttgtcttgcagtgcccctctacacgaccatagcaccagttagtctgactcgtttatttaggacacttccactgggatggcggtgacttccacgccagtgccgaaaatgtcagattcgaccgcgaaggagaatatggcgtccctgtcctccgggctgtattgcgcgacgtcgatggcgagggacacgatgcggatatcaacctgtccgagcgcattgggaatgataatggacgcttggtcttcaactagtgggcttagacagctctgagctctagggactagcctcatcattattgctattgtctggtacaattagatacaatatacatggcagatctctaataacttcctactgttgttgctggtatcacgatttacgttaaatttttgctttactccattatgtctcttcgcatacaatctgtcatatatatcaacgatttagtctaatactctggttcatttacttatgtggttagttggagccgataaatgtcttttgagtcgtttcggatgacttttacatggtttgtccaatatccataaaaaggaaattgttatgtttctaagtttctttctttatttcagatattttcctccatatcgcaattcactcgctccttcccttttgcccaccttccttcactgcctcatatgctcatcttcctctcccattatgtgtctgatgaaaatgccattttcaacgtttgtcccctgcttgatgattgacttgcgattctgactttagctcctgactcttctttatcgcaccatcgtccataacccatcgagtgaggcaaatattccctaaattatcgaagcctcgtcttgcctcccctggaatcgtaacgctatctcgccctcctcaatccagccagcccatccatatacaaggtcaacagacagaggaccagctctgttatttggaaggcgaagatatagacattactaggatttccgaaccaagccgacatcacccctcaatatggctgtgaagccaaaaggctaggactataccccagtcggcctgccatgtccgcagtcatataggtaagtacctgatggtataattgttatggtgtagtagcaagttaacccattaaaaggctcagcgaggatggctgtactgtctatgggcttccggaagacgcttgaaatcctttaagttcccaaatgtcacccacaaccacataaccgtgtccagatgggcttattgaacctcgctctaacattttggtctctacacagaagctgctcagaccgagatgaagagaaaagacttggcggccaagttcaagcacagcaataagataaaccttgtcgactacagttggcaatattattattattgttgagacaggcgtgtcagatccgctaagttaactacggcaagatgcagaaaagtgatttgcagactattgctgccatgctaggattgccataatattgattatgaagggcctacgtacacgaaggacctagcagttatggacgctagtgctggcatgaaagtcatcggagaggcagatacgccgtggtcccaggatgggatcacttccagaggcaaacaatgggagtgatgctttttggggctgaacatgagggcagaattggctggatcctgggtgttggccaggttattcgcgttgggaaattgcaatgaagtctatccattctaaataccaagaaccaacccggtgccgtgcacgaaattgtactccacaataagagtatccccggaaatatacgaaaaagtcttggctagtgacgttcatcggtgcgtaaggccgttgcatgtaaaatgccgagctagctcggatgtgggtggactacctccaccatacaatgctcaccaccgagtcaatagaaatacggctttcgaataaatgttgaaataattcgttgaaatctaaccgtaatttgacaattggaatgctgaatccaatcactggaaagcggaagaggctgtttcccgtgatgcagacaaatgggaaaccactcgctaacgtataagcattgccatctgccaataagagatagtgaatgaaggagattcataaactcggagagaaaatggggtctctctgctagccatatagggcgttgttatggagttgagaattaaggtttaactgtaatcaaataaagctattgcaagggtaagtgtcaaaataaggtccataaagtatgtcggtagagtgcagatccacgtgcgtcccgcatttgtgggtccacggtacggaagtaaaccttcgaagggaccgcttgaaataccgtcttaattacatcatatctttcatccttcatcttttatccttcatccatcatccgttgcaaaataaatatctattgtatgtttcccctcccttcatcactttcgacctaggcacttaatacggaggacattgggtttttcgacgacttctctggcactgtggtcacctttcagacgaatcaaaacaccccttggacccaaacatgggtcatcgaagaacaactatcagagcgttttcaccgtgttgacgaagtggatgtggcccgcaaactcgggccatcgtgagctacgatagagttcgaatgctaccgcgagaatgacctcaagaaaggcgtaatgcgtatctaccttcaagtcccaaacttgaaaacggagttccgaacccctcatcgccgcgcagaacaggcgattgcatcaccaacgcatttagagattgagtcactcaaaaaacttcagcttatgggctctaccgtagcaccgaaactcctcgccgtgcaccaagataaacaaagtgacaccggttctgtgccaggggggtatatcaattaccttgtgtaggagaaggttcccggggagagcttcgacatcaactggttctgggggctctcagataagtcgcgtgctgatattcgtttgaagttcaaggcgctctatcggtaaatatccatacttccacactgatgaaacatttagctaacccatgacggaagtgaggttctagcgtttggcattcaaattttccccccagtgccatcgaaaatcatctatgactttgagactggtaccatgtatttttaccttttcatatttgtctatgttatatgatttatacttagcaacacattctaacctgattctatttaggcaccttcggggtcttgtaatggccacagagaagggagatccgctgcaatgggatgacatattatatgactagtttcatctgttaaatgctcccaatctgaaaagttaccagggaggtcctgactgggtttggtagaggaggatgtttcattgccgtgactactgagccatcaatctaagtgatgtgatcataaacaaagaaaacatatttctattgacttcttttctgccgactagtagtagtaatacgatttcctatatagtcacaacccagtcatcatcagggtgtcgttgataggttcgtcaggtcctgacccaggcgcacaatatgccatgtgaaaaaagcattgtttgacactaacaatggtgcctgggttgaattctgtcttggcctccttgatttccgaatattcagccatccatacaccatcgaccagttgttgacgcaaaaagattgtctgccagtaattggtcatgaagccgtacttgcaactgaggtcgtgcatgtgcatcaaaggttgtgccagtaaatacccgaggcggttgccggtggcgtcggagaggtagggcctgaagtcatgagtaggtacccatgatacctttagctcccccaccatcctcacagttgtttgattgtccaaggaaatgacatcaggggtatgcctgtacataattccagcacattgaaaatcagcgaaagtcatttcaatgccttgagcctgaagcactgcctccaacggcatgtccaattgattggaaaaaccggcctcgaactccatcttcatttccagtgagtacaatttctgggactggatctgtgatgcccttccgggtgtagcccatagccgcagaactccattgttgagtagaatatgtggccacaacatccgtttcgaagttatcccgttcctgtatgctaccaacaaacctgaggctgtggatggtgtttgttatgctggcaaatgggctttgtgaagcggcgggagaggtccgagaaggaggtgtctggcctcaactttacgagccatattcagcaaacctgtaataatcagctgcaatcagttgaatcagggtggggattagactcacagtctagtgttccgtggatagcaaagcccaccgagtgtgatgcagctgaggtacaagggtgccttataacaaagcttgatgaggcggtaataggagagcacagaaagtaaaatggtaccagaggtccctagtgataaagtagatgtggagtgtgtcccgaatatcgcggctgatgatcaggcttatttcgaaccatgaatgtgtgatgactttcgctgattttcaatgtgctggaattatgtattgtaccagttacttattgcccgtagagaattattaagacgtacacgtcgaaacttggccttctgccaggccaggctcagggaaggtattcaattattgaaaggaccatggccttatccggctatagtgcctagggcttcgacataatagggtggaaactggcaagcgggcgggttagaggaatcccatctcctgttccgttagcgtgggatctagagattcatgatgaggaacactatttggtaggttcagccgtagcctgagtgggaggttccataagagcttcagtagcggctcgtaccaggtctggaagtattctcggcagctccaatgtcaggctggtcaggaagttcgatgacaagctcattgggagattcaaagagtgctcatacccaaacggggactccaagatatatcatgttacttgacaaccatctcaattttatttcaataagcgtagtaaatttgatgaaagtgggagtaaataaagaccatatagctttagccaggtatctgttaagtttaaccaaaaggtaagattttccaatgaagaccccttataggttagtggttaattcgttggaattagctgctacgagctatggttgatcatgtcgtgattgggaggtcagttggatgggttaaatgccttggttcgatcctaggagtagtgaacttgtctaggggtgattcattttttttcgctccttacatctatcttataatattccaccagtaagcgttgaaattttgattactaccactctcaagacagctcttcaaaaagtctcctatattagtcgaatgccctgatgctatgatagattgctgtcatatgctatagattgtttgctagatagctaagcgggaagggttgaggtttgcaccgtttgcgaagggtcagctatatcaaccggctgcttctcacttcccacttgcatcttctttctttcctcatcttcgttattgagttaatgtactctttttgctttatgatcgatctggcgcctcacagtaagtacatatctgaatgacccctttggggcggacactgaaggctaaccaataagtggcagcagtcaatcaaagccccgtccgaaattgatacaccctcgacgagaatttccagagttccaacaaaatacaacgacggttgaaaatttaaatacattgattcgccggtaacaacaaagttggttagatccagcgtggaactagccagtgaagttcatgggattcatctaccgagatccaatgaatatggcatgtagcatctacagatttccagtgcccgcaaatgcttgcacattagttggaattggtggctcgatacgaacaaagtctggggcagcgactgtagtatgcaagagaataaaaaatatttcaagcaccaccacacaatgggttaaacaaggaacttcttacccagatcgtggaacgattaaacttttcgctgtttcctatgacttacagacagcttgtgaggagatcgacaaggaacatcccaatgttccaggaaatggccctatggatgatgctcgttcggcgaccatgccagtgccactcaatatacagtgtctcaccgcaggtaccatagtccaatttgattacatctctacgtccataccaatactgcatctttccaggatgaccctggcaatgtcgccaccgacctcggacgtggaagagtcaatcaccggccgatagagtggctaaaaggccatgtatgagctttgcatgagaacgaagacctcatggccaatcatagaatatgtgacgggcatgcctacacagcccgctccatacattcctggtcgagctcttttttcccacctggcccatctatgctcccagtcataaacgaaatcgccatccaacaggctatgagcgaatgtcacgcaaggcctccaaagtactagttcccagccacacacaatgacgaaggaggtgttcgtcttttctgataacgctgatgtgcttaatcgcactagaggcgatcttgcatatgaactggagagcgatgtggcaatcaattggagataattgctcggcactcggagaaattgcataggctgggtgtttctatcgagctgcacttgagcccaggcaattccggtatgccaggcaatgaagtcgccaataaaatggcaaaaaaagccatgtacgagctttgcatgagaacggagacctcttggccaaccatagaatctgcgacgggtatgcctacgcaacctgtcccgtttattcctcgtcaagtccctctctcttcttcgctttttacccgcaatacaagtaataagccatcaccaattatttggaactgggcaattaatatgttgaatagtaggagacaatcctccatttagatttgtatgttgtcaagatagacgtgggtatacatcgtagatcggatccacgggactgtgcctgtcggccccacatattccacatccgatgtgccccgctcggacgtcactccaattctttttccactccaagccttgtctctctcaattacctgaccgaaaacttctcaattgtcgctcctctcctgcgttgcgcatctgaaattctgacatctacaaggtttccatcaccctcagttactcccgtccaccgcttttcgcatcttcccagcgcaacccaaagacacaaccagcctccgacatacaatccaagaaccccttctccgccatggcacccctgatccgagtcattggatcactcaatgtggatatggtctcagtcacaccccggttcccaaacccaggcgagacaatcacttcctcatcctacttcaccagcgcgggcggcaagggtgcaaaccaagcagtggcatgcgggcgtatgtcccgatctaagccaacaggcaccgccaactccaccagcgatgtcaaagttgaaatgattggcgcagtcggcgcgctagatgcccacttctccgctctgctcaagccgaccctcgagagatccggagtcgacccgtcccgagtgaaagtcatcgagaacgcatacacgggtgtggcggtgatcattgtggactcgtcagctggcggggagaaccgcattctcttctcgcctggtgcaaattacgatggcatgcagcctaccccggaagtgctgggtatggcgctagcggcgcccgtacccgatgttatcgttatgcagggcgagatcccggtcgaaacggttattgggatactacgcgagatcgcagcttacaaggccaaggctcgcgctgctgggaaacgcggcattgagtccggtccggatgttatgcttaacccggcacctgcgccgcctggtggcttgcctgaggatgtatatgctgctgtcgaccatttgatcctgaacgagacggaggctgagctgatgactccccctgcggaacaactgcttcgcacggttccggacgcagagggcttggatggcaaggagaaggtcgctcgatatttccacaaattgggtgtcacttacatacttatcacgttcggcgagaagggcctttggtacagttcggccgatgccggctcctctggacctagtgatggagtgaaacgcttcactaatgatattccagccgcccctgtctctcatgtcttgaatactactggagcgggtgatacatttgttggggcctacgcggtcagggtggcgcggtggcgtgagcagcgtcgcgcggatggcaaggctgggcaggatcttgccgatgacgagaaggcataccggtataagactgtcatggacgaagcgatgcatgtggctgcgcgcgcctcggctcgggctgtggaacgtcagggtgccatggatagcattccttttgagaatgaggtctaagctaattggtacgggaagtctgtggtaatgtgcatcaatatatcacgagagactacagactatgtatatagactattccggtcggcatttactgcctgtagtagaatgccgacgccatcgtacgtcgatcgaacaaaggataggctcttggttttcgcgagtaatgcaacaaggatcagtacgccgaggaaataatccgagcccatgagggacagggggcgcatgtgccatcagaccttgcgaaccctgtccctgtccatgtaatatccctattaataataaccctccatcattctacgccttggacagccttcaagggcaaattcctactttgaaccacctggatagccagtccagagaacattccccagccttgagtgcacacccagacacctccaaccctcactctgagacggaactccgtaaaatgtttcacaccgtggaaattcacctccaacatccggcagcccccgatcggcctatgcatgcatgatttcatccggtaatctgagtccgaatgggggatagataaccaatggaaacaggatgcgttggcagtttcattggacatttcatgcaatttactattagcggaattgtagactctagttatcacgaatgagcggacaatacgcaaggaagagacttgaacgcgaagtcgcgcgcgaatgaacgtgcaagacgtggagaacgtgagggacgtgaaggtatttggtacttacgcggtgtatgcgctagtgccaggatgaccgagtaccgggtacttcggccgcatgaccgacgcgtccaagggatacgcgactatgcagtgctcagcgggggggaattgaccttttggtctttgctccgatgatttcggtaatgatttacggaggacttgtacaggcaattataggggaatgaggaattcattgacaatggcacagtgatatgaataccagttagatcatacgaacagcgcgtagtgatctgcatagtaccattgttcccacacgagacacgagacaagacatccaagaatgaagtcaattggattgtgctgggagctgggaatcggcataaacgccactttttcgaattggcagcctccacaacgtgaacgcgacgcgctttgccggcgtatgcaggccttgaaatagttcccttcgccctccatttgtgactcctcatgttctttattattgctccttgcctctaaccctctgatttcaagctcttaacgcccttaacgtctgaaactattatatctatctcatcgctgcacgtcttttaccccgaatcatccctcgttctctctcttaacggtgtagtcgaccatatcctacccatttcattatccaacctatatccgaccagttccgatcattgaatcattctattgcttttgaatcttttgtcttacccaattgccctctttctcttcggatcgtgcgatcggcctgcctagtgcctatttcagaccgccaatctcccccacttggtgctgaccaaaacaaaacatcccccttcttccttcaccatggccactctcactatgactcctactcgtcagcctttgggctgtttggacatgatgccgttgatgcgatcgaaactaaatcgtcagaaccagcaaaatggtacgtgacgacctatgttttgatgttccgaagacggcttagctcacaatcccaaccaggtgccatgtctatgaagtcaaccccaatgaagagctcgatcttcatcgacgccgattccgagaatatcaatccagcaagcttctccgccaaacggaagcgtacttctgaggacgacgaggagaacagcgcgtcgaagcccatcaaaacatcccgcatggctctttccacccgcataaacatctccccccgtctctcaaccccctccaagctctctattacaactcccaaatcagctcctattctcaagccggctggtcgctctccaccacccaagtcgagcaagtccgccactcgccgttcgctcatcgccaaaccccgctcagagcaatatagcaagcgcggcgtggctcgtcccttctctcttgcttctgtcctcgctcaatccaaaacttctaagcctacgcctgcccccaaggccccggcctcatggtgcttcgatatccacgtcgacaccgagcaggaagaaatgaccaacctgatgcatcactcgaccactgtccttgatatcagcgacgacgagggcaagtccgacacttgcccccgtggaaaggagaatattcctcctcacgagctgggcattgaagtccctgtcgctcgtgagtccactgccactattcctgccgtcgctcgcaagtcgaagatggatgagccgcgtgctgcgctcggtgagctcgatgctgccgaatactatgccgagggctgcaatgctttgtcgtatacgatcatctatgatgatgaagagcacgcgcctgagttcaagaagccctcgttgcctctttcccggagccaaaagaccgttatcactacctccattgcttctgttttggacgttgtcgctgccgaaaccgagcgccgaaaccttcaggactcaactgacagcaccaagtctgctctttaatctaacttctcgtcattccttgcgtctgcatctgcatctcacggcgctgttctttggccagggtttggccccaatacctatttgcttattctttggcgtctgtctttccggagcatggtgtttgtcgctttttggacactggtgttcagtctatcgggtgttttgatatagcgcttgaattatgtatctgttttgcttattattgcgaccactcgggttgacttgctttatcctgtctaattgatgagttactctctgtgttatgtcttatgctttacgatgtactccgcgtctgcctatgaccctagcaacgataaaatgattattttgatgactatctcgatcacaaagtaccatttcctagacgtagccaatcatctagtaatttagtagcgtctgagtcaggtgacatctcgatattttgtgcagtacgccgcaattcctataccgatcagtttgattcactcgacagttcctgtctcatgaactgtgccacgaacctcgcctttggaaaattttacgcattctactacacaaattgagtatatcgttgtcggtcgtcacagctattgcccctgaatcagtcaaaagacgctcataactacgcaaacagctcaacgagctagatccgatccgatcggcttttcctacctaccatcggccttcttctggccctccagtggagtggcactgaatactcttggaataacccttggatcatcgttcttttcgtacttattggtgttcttctgcgcgcctttgtagctgttcagatctgccagaatgagaaggccacacctccgcgtatcgtccgaaatcgacacatcttgtcgtgaacctggtttgctatcacgcttaatggtgctgaatttgtctttatttactacctaggctcagtccatggcggctcggtgttcgccaaagctcaatttctagctccctttttggttacaggcaatcaaaacggcctcgactactaaatcaagtgtaatgaacctgccgagttatcgttgcagtcgttgccgtgtctattctatccggtttcctcgttatcatgcccgattacaatccaaccacaaaccgtcttcggtcacattagcgatttgaggccagcctactcagtaccttgaaggcagactcggggagtggcggatggattggctaccagattctagttagaatcggtgccgttcttggattgcaacagccgagccttttatgtgggcgtgggtttagcatcgctttccttcgttggaacgatcgcgttggaacttaagtctgccaataagccgaggaacactatacccaatgatgacactgcaatttgagtctggatgtgtttgggggtttgaggtgtatatagcagagctaaacgatggcatgacgtcatttccgggtcccatcgacacctcgtctccgcctctaggtatcttgttagagccaagcaacgaggccatcgctggggcaggctggattgaagtgtcagcgaggcaagttgccttttttctctcctcttcttttttctcgccacaaaaccttgagggcgcatggatcctccttggcataacttgggttttgactcagcttccttaaagagtaaaagggcaacctgcattggcattttcccaaatcatgtggaaatagtacacgaagaagtcccttgcataatgtgacccatctgatcggtacataccaacgtcgtactccgtacgtagcacgaggcaatggaaattattaagctgtgacacataccaagcgggatatttaccgccactgcatgagacacgtcctctacagacatagtccgggaggaaaatggaagcatgagctattgccattgtcgtagaatatagggcccacactttcattgggatgatctttagacaacactccacatctctaactcacttcctttctggacaaacactcgtatcagtataccacaatgacagtctcttccactgtccagcctctcaaggcctctgtgccagcggttgcacaaatggcagatatgcctcatcgtacactcagcaagtcgatgacctttgccaatctagaccaataccaatattggcatgccgtcggtcctatgctggggaggatgctttccaacggcaactacagcatccatcagcagtatgaatatctgtgtctcttcgcacatatcataatcccaaagctgggaccattcccaggcgggagagacatatacaaatgtctgctcggaggcaccggctccgtggagctcagtcagaatgtccagaaatcaggcttgactgcacgcattgctttcgagcccacaagctacattgctagcaccggagtcgacccgctcaaccggcacacggtgcacgctaccctggccgaattgagggctatcgggtctgccaccatcgacatggagctgcatcaaatgctcgtctccgagctgacgttgacggaccgcgaggaaaggcttatgtccccgggacagatctccggaactgcgtggaagacgcaaattctgcttgctttagatttgggacagtccggcggcatcacggtcaaggagtatttctacccagcactcaaagcctccgtgaccgggcaaagcgtggccaagttgtgcttttctgctattcggaaagtggacaaggagggaattttcgaatctccgagtaaggtcatcgagacctatatgcaaactcaaacccagacagatctctactttttgtcctgtgatctagtcgatccagcgcaaactaggattaagctttacctcatggagctcgacatgaggctggcaaaggttgaggagcactggacaattggcggcaagctcaacgacgaagagactttacttgggctgcaaatgctgcgagagttgtgggtggagtttgggattattgagggcttgcgcaatgagccggagcggccatcgctgcccggggatcccgacactattgttccattcatcatgaactacgagatgaatcccggcgaggtattgcccaagcccaaattctacttccccttggttggcatttcggagctgaaaattgccaacgtgctcactgcattcttcgaacgctacgatatgcctgagcaggccgcagtctatcgcgataatttgcagacatactagtaagtttattctgctgctacatatcgcaatgcttcttgctaacctcgtgttatatcagccccagcaaggacttggctgtcgcaacggatcatcaggcttggctgtccttttcatacactaagaagaaaggaccgtacctgactatgtactatcactagagattttcatgttgatagtcaaggtacgtttgaagcagacaaactagcgcggcttagattgagttgggatgaaataaatgcgtgaacgatgtctgttgtgtgtaatttagaacatactatatactacctggcagttgtgggctcgatgaaaagcgtaccctgcatttctgtacctgcacttgtcggaaagatattgtgcttatgcatcgaccattatgttccgatcacaccgtgcagtgtgtcgatgcctgttcgttccaggaattagtgaatctagcacatggcacacctacaccgctgcataatgaggtattcgaatactccctacaaactgtcaccagccggcagtaaaatacaactgattcacaagcaagggggtattaaaaattctgtagcgcatggcagttttcagctgggattgaactactaagcctatttagaaaaaaaaaaaaaaaacgctcaaaaccaagaatggctcgagaatggaaacttgcaggatagtgacatgcaatatacaatgtcatcggaggtaagaatgtgagatggtatactagttccaacgtaattagacacgtggatagcccgagatagaccgagagcactacaggcagccacggatcgggcaggatgcaagggggatttgccacggccacggcccttctggatgcaataaaagaatgaccgccgagaatcagatattacctacatctgatgtttgcctcccggcagtgcattccatagactatcgattgcctatcgatctccgtcgatccgggttgcgagtgggactgagagaaggcctacttcgagatcacgcgacgattatatgtcgctgcatgcaagtctcatggatcaagtacggcgtggtcacggctgctagatggtagtgtgccgacgaaatttggagagagtcaaaccttactccatacaagatacttgagcattcaactggtgttgtgaaatctgacttgtcaaaagccaggtggataccccgttgtttgaaaatggacatgagcagcgaacaatattcccagtaggaatgcaggagcttcaataaaacaagttcaaacgatcaatataatctcaatctggcttattaaagtagaaaaaagcacatatactatatcgcttccaggataatctcctgctcggcaaccttgaaccacgcttcgcctcgtttccgggcgtcctcctcattcacagcagactttccagcggactttaactcgtaattttcgacggtgtacgcaaccagcaccttgaggatcgtatctgccaaggcttgcgcaatacactggcggggcccgaagccaaaacgccaaaagcgataccgaaagctggccctagattcctccaggaaccgccggggccggaaggtcattttatcggagccccacgcgtcatcccagatattcagcgcattggtgtcaaccaccatgaaggtcccacgaggaatgcggtatccacccacatcccggtcagtgggcatcgattgcgcataggtgtagttggtgactggcttcagcctcgcagattcattgatacaacttgccagcagagtggtgttgctggcaatgtatttgacccaagactctggagttgtgtcggatctggtctgtgagatctctgctctaagctcggtctgtaatccgggatcctcagccaggaattgtgggatccaagagaagctgccaatcgtcacatcgatgttggcaaatagtgcttcgtccaatgtatgcatcagctcggttggcgtaatctgaccttgttccacggccctatacaagccaacaatagcacaagcagaggcatcgtcacggttcattgcatattgatacgccttccgattgaagttagcccagcgagcgtggaagacgtgaagcttgttccttatagccgggtaaaatatcttgctgatggaaaagagtgacagaccacccttgaaggcatattgaaacacatcggtgcgcaaatcggtaatgtgcaacagctcctctgtcatctccggggacaagtttccatataagaggtcgctaatgacccagaagggcagaagcttgagatcctcggcgggcttgattcgcagcgttttcccgccttcatactgcttgtataactcggaaaaatggcgagaaatacgggaatggacaaatggaacgtatgtcgtgggcttctgggtaaagggtggtgaaactacagcatggactcgtttccagtgtccttgactgatcagaccgacaccatcgccgactagatctcccattacccatccaccatttaggtttgaagccttgtggtggttaccagagtctttaaagaccgtcttgatctcatccgcgcgggtcaaaatgctagacttcatttagcctgagcagttcatcttgaagagagcgaacttacatttctggcgtgagtccaacccagatgcgatacaccgggccatatttctcggcccactggcgagagacattctctccttccaggaacttgatactccccccgccatctggaaatcggtagggacaagttggaataggcgttgagccatctgttgaatatattggataccaccagagtaaaaatttctacgttggcagtcagcagagttctgttgatgtactttcggggtattaccgacattgattatgcaggacactactcgatttgaccaagtatttggttgaaaggagtgccacaaaatgactaggagtgatacaactgccagttgcagcgtaagaagaatgtaacctgacatcatgtggagctgacgttggaaagaaggaaaagtaacaaacggaggatataaatgacgattttgaattcgatttgtaatcgatagcatgggtgtaacttcccaaataggtacgtgcggtgatataaaggaacttattacagttcccacaagtgcggctgacaatccgaaacgacatcaccgagtagccagcatcttacatgtacgaagtacatgtgggtccaacgttgatgcacaaggacgaacatgcatggtcgcctcgcgttgattccagcgagcgcatggtgtgttatatgcaagggctagtgaattgttgcaggtgtagccacgcactaagaataattggtggtcagcctcagcgtggcaactataacgacattctttctgctgacagctcattcttggctatttttgaagatatatcgggagaggtcatttggaccgaagtgaaaatgtaccatgtacttgttaccataaaagaaccatcatctatcggaggaagcttgatctcttagaatattgtccaccatcgccatggattcttatcatggtcgtcataatatttccattcctttgggcaaggaattggaagtgaaatgcactgataatggtgtacctcatcttctcaaggcatcatgggccttgttgcttgccaggctctcagaaacgcaaacgacaacatttgcagtattggaacaaccggtggtccctcgggatgcgtgttcgaaattggtggcttcatcttcacatttagagacatgggaaatatcagacaattcggatatacttttggtggatgcagcgaaggaaaagcacagagaacctctttcaggcacacagacctcgacgggtgtggtcatcaggtggcatgatgcaccgaacagtccaacctcggtaagaaggactcgatacatgtattcttcgcaatttactaaaagagttccagttgccgtgtgcattcaatgcaatgattgttttgggttgcagcagatcaaccggtcaagtatccttggaatacccaagaacatctctcacagtgaaccaagcctggtcacaattgacggctacacttcacattttggaacaaatggttatgaccccagggttatcactccgggaggtggatttcctgggctcatatagcagcaggttaatccagcaatggaacaacccgtatacactcgcacggccacaaatatgcattcataccttgatcctggagcattgtcggagccaacccgatgccgaggcactgtgtgcttgggatggttccatcacgtatgcagagcttgacaaattttcactcgcagtcgcgctccagctgctgtcaattggtgttggcccagagtcagtggtcccgctctacttcgaaaaatcgagctggacggcagtcgccattctgggagtgttgagagcgggaagcgcttttgttctcctcgatccctctcatcctatgacccgtctggtcgatatttgctcggaggtgcaggcaaaagttgccatagtctgggattcattgcaggagctgggtcgacagctgggtcctcgagttatcactctcctcgacacaataaaaagccacgtcgatacaaggagaaaacccttcaacacacaagtcaagccttcaaatgccgcatacatcgcttttacttccggctccaccggcaagcccaaagggatcgtgattgaacaccaatgcttcgttgcaaatacgctggctcagaacgcagtccagaatattaatcaccaaacccgggcgtttcagtttgcctcatatgggttcgatagtagcattcttgaaacactcatgaccctggtggcaggtggttgtgtttgtataccctccgaggagcagcggctcaacggcctggcagatgccatccgtgggatgcgagccaactggctcgaactgactccatctgtggcacgattcatcaaccccgaagaggtaccgcacgtaaaatctgtcttgcttgtcggagagccgatgtctcaagaccatatcaaacaatggtcagggtcggggaagatccaactcctgaacgcatacggccccgccgagtgcagtgtggtagccactatccagccccatgtggaagtggaagatcctcaaaatatcggtcgctcatacagcagtcactgctggatcgtgaatcctcaagatcatgatcagctcgagcccctgggtgcggtgggagagttactcatcagcggaccaatcgtagcccgaggttatctcaaccagccccaccagaagtctttcatctccaaccctcgttgggcgacgcgattcggcattcctccaggcgaacgcgtttataagactggagatcttgtgagatataatgtcgacgatggcgcgctgcgatatgtggggcgcaaagaccgggaggtcaagattcacgggcaacgtgttgacctgcaggaaattgagcatcatgcctcccagtttcagaagggaatacttgcagtggccgatgtgatccaagtcaacggtagtagcgcggggaaactccttgccttgtttatttccgctgataatgatgatactcgcccgacgaagcacagtttcgttgtccccatgaatgacaccctcctcgatttggtgaccgacttgaaacactggctgcgtgactgtctaccaccatacatgatcccaaccaagtatatgttcgtcaatcgctttcctttaacgagaactagcaaacttgatcgacgagccttgatcgatcttgcagcatccagtcacccgccgtcaggagagcatccgtcaaagcagcgtgatagagaagatgtcgagctggacccggagctttttgccaaggaaaatatcttgtgctccgtatttgctgaggcattgggctgcccggaacggaacatcggtgcagaggacggtttctacgacatgggagggaattcattggcggctatcgagctagtagcccgtgcacgcaagcgtggcctggaaatcacggtggcggatgtcatccgtcttcagagtccacgagatattgcgcgatgtaccgtggatagcaaaggggttcatgagatctcgccattctctcttctcatagaccccgagcagagtctatccgccgcgacagcccagtgtggcgtggagagagcaacgattgaagacatttacccttgcacccctctgcaggaaggtctcatgcatctatccatcattaccccgggagctttcatgggcacataccgattctccttggctccttctacgaaccttcatcggatctgggctgcatgggaacagctttggcttgtacatcccatcctccgaacacgcataattcaacttcaggatggtcaaaagcttcaagtagtcatcatgcaaaagcttccacgcaaagacattttagtcgtggatgattgcgagccgatgagcttggggacaccccttgcacgtttaacatttcatcctggacgggcttgcggcggatctgactctggaatgttcattttgaccatgcaccacgccctttttgatgggtggtcatatttgcagctgctcgaggatctccaggtgatttataatggggacagattgccaccacgccctgccttcaatcatgtcattaactacatctctaatttgaagattgaggaaggtcactctttttggcgtcaacatttcaacgatttacaagcaacaatgttccctatctcttcccggcggtcaatcgcgttgccacattggcaagtcaaaagccagcaaattatcctggcgaagtcggatatgaactggaccctcgccaataaaataaaattggcctgggcccttgtgatctcttcccaaactcactcgaatgatgtagtatacggattaacagtctcgggccggaatgccccagtaccagaaatcgatcgtattgctgggccaacttttgcaacattccccttccgcacgcagcttcatgaccagatatcggtggaagatatgttgatccaaatgcgacatcacgacgtctccatcatgccatttgaacatattggtctcaggcgtatcgcggagtcaagcccagacgcagccctggcttgtggattccagaatcttctcaccgtcaggttgcaatctcttcagattcctccgggcgccttgattgatttacccgagaatgaagatcatgacctgaaatttgcgtcgtatcccctgtcaattgtggcccagcaggagggcaaattgctagaggtcaaggccatctttaataccgacattctaggatctgacaggactgagtcactgctagagcagtttgatatgttgttacaacgaatccttcgggagcccgggacgacagtgagcaacctgagacgtcagctagctcccgagtggcagcaattagcggcgattaacaggaagatctcgcccgaactgcattgcctacatgatattatccaggacttcagcgtcatccaaccaaattcagaggccgtctgcgcatgggatggctcactcacatataaagaactagtctcgttggcgtggagattggcaggccatatcaagtctttcgggtcccggtcggaacccggtgctgtcatcgggatctgtgtggaaagatcgaaatggtttcccgttgccatcctgggcgtcatgatgtcgggagccgccatggttttgttagaacccaatttccccgtgcctcgtttgcagcatatcttgcgagacgccggggcacggatgatgatatgctctctggtattccaagagaagtgtacgggcttggtcgatgatatgttgattctgactcccgatattgcgacccgagcggactacgatacttggactttgccatcggtgtctcatcaagatccaatgtatgttgcttttacatccgggtcaaccggtgccccgaagggtgttgtgatcgagcatggcatggtatattcgatgctcgaggcacataaggacataattggcgcatcaaatgggtcccgaggcttgcttttcgcctcgcccgcgtttgatatatgccttgccgagattgtacttatactcggtgccggaggctgcgtatgtgtgccttctgaagctcaacgcatgaacagcttggcgaaaacgatgacaaccatgcaggtcaacatggctatgctgactccttctgtggcacgcaccctctcgccagctgcggtcccttgtctccaaactctgattcttggaggagagccgccatcagcctccgatttggcgacatgggcttcacgggtccagctgcatcaatcctatgggccagccgagtgcactatgtacacaaccactacaccgccattgactcccagctcggacttgggcaacgtcggattttctccaaacgcgtcatgttggatcgttgacccggagaaccatgatgagcttcaaccggttggctccgtgggagaactattgatcggtgggccgattgttggaagaggctatatcaaccgaacccaggagtctgcagcggccttcattcgtgatcctgtctggagcgagaacttccccttcttacgaggagaccgactgtacaagactggagatctcgcttccttgaatgcagtcgggtccttaactttggtcggccgaaaggatacacaggtcaagctcaatgggcaacggattgaggtgcacgagattgagcattgtgctgaaaagtaccaacatggtaccgcggtcattgcggaattaatcaaccctgccggcatccagagacctagacttgtcatgttcctctatgatcctgcgacggtagaaacaacggtgggcataaactctgcttgtcttgaacatcgggaactattgctcccaccgtcaacacgaaatcaagcttaccttgaaggtgtaagacatcatctcaatcaataccttccaccgtatatgataccatccctttttctttcgctgtcccgtctaccgcttagcccaagcggcaaggccgaccgcaagacactacgccagattgtttcgaaaatggatagagagacattggagatgtatatggataatccggtggcagagaaaagggaaccaacgacagagcaagagcgattcgtccgtgcaagttttgccacggccctgtcattgaatgaggaggctgttggcatggacgataacttcttcgctctcggaggtgattctattactgccatgcgcgttctcactttgtgtcggagaaggaacatggccatctcgatgcaggattttctctcaaagaacactgtatccttgttttgcgcaaatgccattgtgattcaggcccaaactgttgattccaagcgccagaaagccctgaattccgaagactccgttcgagggaaaaattatcttgtccagtttgagcatatcgaataccagctggacatggttcgatctcggttgaatttgttgaaatcggattccatcgaggaaatctacccctgctctgacgcccacagtggggtgttggagctctatacgtccaactacacaagcactgctattttcgaaatttgttccaccgaatcagtgactgcgatacaggtgagcaacgcttggaatcaactagtgcatcgtcatgtcgccttgcgtacagttatgatgaaagaaccaaaggttcatgcagattaccttcatgtagtccttggcaagggaccagctcaaattcttgctcttccttgcagcaagaatgccctcacagagctgaaaaatctcgaaccagtccaattctggggcctgtcaccaccacaccggttaataatcggccaggacaattctggagcggtcttcataaggctggaaacgggctatgccttgatcgacgccttttctatgaccattctactagaagaactttctctcctcctccagggtcagcctttgccagagaatggagtctcgtaccgtcaatatctgtcccatttgcacagccagtcgtctgcaggaacgctgcaatactggacacagacgctttatggagtatacccttcccacctacccaaactccctgctaaacagtcccctctgcctgaaccgcgctcgcagagccgctgcctgtcattcgcgcaatcaaagcgtttagattccttctggcgttccaatcatctcaccatcaccaatgttttccagctggcatgggccttgactctcacccaatacaccaattcccgcgatgtgtgcttcggaaccatcacctcggggcgtgatacccctcaccttgaagtatggaatattgttgggtcatttttcaacattcttccgtgtcgaattgcaattgatcccacgcgcacggtattggatactctccgacagaaccaggagaatattcagcgtcgaaacgaccatcagtactgttccatgccagatatgatccgaaaagctggaataaggagcttagacaaggaccagcagctgttcaatacagttttgacagtgcagaacccattctcgacacgatcatctactgcaaaggatgggagcaacgagatcgatatcaaactcatcgatttggacgatgcaactgaggtgagggcctttggaactaggaccacgatcagaccgacaactgctgactcttttagtatgacctatgcgtagctattattccctcccattcccacttcaaggtcgaactacgctactggacgacgactgcatctgaggaatatgcttcggatattctagattgccttttcaaccagctggaacagattgtgcatcatgcgaccaagccattgagcgtcatcaccagtattggatgacaaccatatctcccaggacttccataatttctccttttgttatctaattttcggcattgttcttttgatatttccacactttggattcgcagatattcccgagtcccggtctacattattctcttagcacaatcaacaaaacaatataaagcatgaaatactggataaagttggttaggacttgtcgtccatgcaagtctacgagtgctcaagcatccgattccaaggcaatatcatatcctagaactggtctaaataatagaagagaaacaacaaaaagacaacacatagacagccaccaatatcgtggtcaatggatgaaacgccattcacacccttttccatacccgaacacggttctaagactggttccaactcaaattttgagggagccggtcgcggaagggaaaatatcgaaaagaaaaatccatgtacacaaaagaaaaggggaaaaaatgggaaaaagacaaataaaaggcagggggcacaggttgagggcatcggtccggacgagtaccgccgaaaatctcaaacaaaaatatcgttgccccatagtcgctatgtcatcacagtagaaaataaacggaaatcacatgtccatcagcagtccatctcctccgagacattatttggtggaattgcttcgatgcaagatctgtacattggttgcactggtaccactgccgaccgatcgtcgtcgcgggcgaatctcactgccgcttccgctccttcgccgtcggccggtgcttcgaatcgagcctcggcgtcgtgtctggagcaaacggacgttttcacgttagaattacgctggctgtacatgggcggacgcggtctcttagcaaaagacaagtacgagggcgatagggccagacaaaagggaagtagttcgcataggaatgcacgtatctgggcagcaaagcagcacggatcagagatgcactggacttaccgaattaggggtgccttcccggctgggccgatccttggaaatatcgggatcatcttgcaactttagggagttcaaccgcttttggctctcgtgagtcatagcctctacctcatcgatcacctccggcacgtcaagagggggggctggtggtgggggaatgccgttcttccgatctttggcctgttgctcaatcacgtcccaccgttccgaacgaatcttttcacgttggtctgcgttgttctggtgctccgtgtaatcgtgagagcattcatcgaaaagttgcgggttgatctccatgaacatcttcatggcattgtaaaccatgctgtggattgttctgggaaaagagtcagttcatatttaagcagcacatgcagatcaaactcaccggttccagtgtcctttcgagttctcgtaaagcggcgcaaacataagcgggagaattgtctccacattgtcgctcacaagattacagaaatactcgttattccagaagtacaaagcacgttcagcaacctggaaatgaggactggcgacagacttggccaactgattgaacagaggctcctgtactttagcgaactcgcccggatccatcacctcgaagatatcttccacctcattcaggtacataacctccttagtgctattggtcttaggccagaagcgcagtaggccgagaacaacctagacatagtggttagtacccgaagtagattggagatgataatttagggcttacatcttcggtcaatgaggagtctttctccaaaaattgcactatgcagtaggccaattgcgggtggtacatgctgagactcttcaccttgtgcatgggtaggagcactctagtcaagaagagcttgtgttcctcctttagcggtaaagcgaacccgttgatgatggagcccagaatctcaagcaattcggcgattccgttatggcgttctgtctcgtacatgaactggaaaaagacgttgttgatggatcggcggatatatgaccgcaaattcaagaactttccatagatgcgatgcagagttgtcttgaggaagtcacgttcccggggatcttccgagtcaaagaggtccaacaactagatgtagtattagcttgtattaaacatggaaccgagcagcaggagacataccgaaagcacaaactgatggtcgatataacccttggcgatgttcgtgttgaaatcctggctttcgatgaatctcaaaaagaattcatataccacctggatatgaggccaagcgacttccaagaccggctcatcctcctctgggtcaaatgcctcaccttggggcgtcataggcgggggaataggacggaacaggttcttggcgaacatctctaccacgcgggggtacataggctctgtaatgaccgaccgattgttggcaacataatctaagagttcgtgcaacgccagcctcttgatctccttggacttcatatcagccgtagggtcgttgaaatcgaatatgatattgcactggtcgatcttttgcatgaacaaatcttggcgccggttgggaggcacttcgtggaatcccggcaacttctccaattctctctgacgctggtcggagatgtcgaatcgcgacgaatgttggcgtttgggggtccggataccttctgagatgtccttaggagttgtctgtaggcgatcgaagacatgggacttcctaggaggtgcaagatctccgggcattgtttcggcggcaccaggaggggggacatgctatgtaatccaatccattagaaaattcaaatagtgaaagctgagccaactggacttaccggtgggcttgggctaatgatgacgttgggggccgctggttggccttgcctgttcggagttcctggtccattgcttacaggctgtccggcagtgcccggttggggtatatagtgttgaaccggggtgccggggtgaggtgcgcccgcagaaggggttccggctggggaggcattgtctggagatttgtttcgcgagtcattgagagaggttgtagaggatgtgggtgtcccttgactaggggaagtaggctgctgtgcgctagaaattccgagggattggttctgtggagtggagttggagtctttctttttcgaggacttattgtctttcgcccgcgacaactggtcgtgctaaaagcaagacacaaaatgttagcttatttgcgaggtaaatgaggtagcaccagctgcaaggtggagaagaggatagattgccagaagtgatagtgcggtgaggtgcacttggacaggatacgcgggtaactcacgactctctgtctgaaacccttcattttgatgattatgtagatggccacatgtactcggctatgtttcttggtgccagtgcagccaggcggcgcactctagccggaatatatcgaaggagccaactgaaatagccgcccaagatagccacgagggggtggggggacaagtgtttgaattgacctaataggagaatctcataagcggtccgagtcacacagcaggtaagacggttattgtgaagggagatagttctgaaattctgatataaagccctgggaatgcgtggaggagaagctggggttcaatggcaacatcatcaggcgctccaaacaatgtgcagtcgcagcacgcgcacggagcaagacgatgataggaagaaagggccaatgcaggcagtgggagacgagagtccgatcaaacgtacctctgtagatctgagttggacaattgacggatcgagtggcaaatttctcggcgagagcagttgttataggacaagcttggtcggcgctggaggatctccgtgtcgcttagtggcaggctgggagcggggggtttggtagcaccagacgggcactcaggtcgcagcccactgcgaaagcacgaaaatcacggtctgactagcaagagacaaagtggacgatgtacaagagaccaagtaaagatgatgtcgttgggttgtggagaggggagagggaagtggattgttgttgaggtgtagggaaaggcgggctagttctcctggctgcgatggtgatgggggggaccacgcccaagtactatgtggtggactttacgttctggctaagtggcctggatctattcgccctttaatttgagacaatgaatttactcgacagctatattattccccccttctcttctcctaacatcactttggtatgctttttcccgcttgtttcaaattatgcttatgtcatggctcacgtgacctataaaggaactcgaatttcaggcacagacagcaacgccaccaacaccggacacccaggtaactgactctacctattcacggagtagctaactgactagttagttagtcaattagtgattgaatgtgtttgcctattatttaagtctgaagaagtcagatgtagttcacatgtgatatatcctttcgagtcaagcaaagcaggtctgtgctctacgacaacaatagtctacaacaacaatagctgtgtgaggcataaccttaggctacagaggaaatttctacttgaaaggtctcgatatttccgaaaatcaatcttatggcatatcataaggtatagcactgctgaatgttgtcgcgcaaaataattcggagaagtggacatatatatctttccaaaggactacattagtatttctctccttcacatcaccacaaccaacgcggataaacacctatcagccttccttacttgcaatcctcgccatacttcccgatctctgtttctttaccaactaaacccttacttgaatactgaccgttacttgatcactggctcttactttccttcttcatgctcaacggtctttgacattacctccaatactcttagcttccaccatggcggacttcatcatgcttcggatcgcatgtcaggatatagacgctctatcttcggacagagagaccaagcccctacgcgagtcatgtcacgaaaccatttatctggatattctttagtgtctgcaatgttttcgcttccaagtcagcaacaattggaatgatgatagttaccccttttatgttatgtgtcgaattgaagccggctcgccacaaaagtgttgcgattgcaaagaagccggctacaaatgtgactggggaagctttgactcttgctaaacctgtgcttgaaatagatgcttacaccgattgggatcttctacagatcccgcagggtatccggggccatgtctttgaactgatggccttgatcgaattcgcgaaaagatactggaccgacaacggtggtatcggtggtgtaccaatgcatgtacggatccggtgtgaaggtgtccctgaggaacatttccccgcgttaattgagctctttactgcctttgatgacctagtcgagacccatataaaggctcatatgctgacaggcaatggctctaacgtgagttttgttcaacgtgttctacattcgtgaggatattaatcctttacggtgggctttcgtgattgtatcaccggggttatattcacgatttgctttttttttccgccagcttcttcattgtgaggtttcctgttaatagcgtggtgaggcggctattgaccaggacctatttgatgttttcctgcctggttctgtggttgtttcagtgcccttacaaagcatctttttccagctttttgcatcatttgaaattatagactctactaagcgcaagtgatcctcatatttactaggcgaagacataaggtttaccaaacaaggtcgacaggataggagatagcaacatcggaggtcaaaatgcacctcataactaacagcgtctacattagtaccgcaaagttacgagaaaatatagaacgcaaagagaagagacactagacttggagccaaaaatgtcccaaaagtttctgatccgtttatcattgaccactccctagaagtatagttaccagaaagacagaaattgctcgaaccaactaattacatttgatattcaccgagtttcgttcaaatccatacaacctcattgagtcaacattagaaccagcgatcgtacggccatgagggctctacccaagctcaggcgtgtgcttgacacagcactatttttctcacttgtgctactaacaccggcagctgtattttcctcagcatatgtgtagtaaagactagcggctgtctgcgtgcctagactatcagcagcagtggtagtgggcaaactggccgccgagctcgacgaccattcttttgcgaaaggatagaatcctgtcgtttgagggttggcactacagtagcgctcgagacccccatcacgtaactctgcgggaaccagtggtagcctgtgtaaatgttagtttttcaatcaaaccagagaaaagcatagcgccaatatattctgtggaaaagacccaccctcaatgcctccatgttttctgaaacactcctgacaaccggccgctgagtcaaagaagggatatacgtcacaatagcattgctgctggacatcccaatggtccgaatacggcacaaggcctgaaaatgtgccgttcatgttccagaaataacaattagaatttaattcccgcttgtcgttgacatggagcctcgtcgatcagatatgtgggcttgggaccctaggtcgcgatagtagagttaggtaagtactctacgaaataacgtaatcggtaagcgagccgccactgtaagcgagccgccaccctatccaaaacgcgtccatgaattagcacctagttagttcaaccacccaccatgccaccaattcgctctcaatccgctagcaaattagaacagcaagagggtaggcttttattagctatccaggctcttcaaaacggagatattagctctattactcttgctgcgcgtacttttagtatcccgcgtacaactttacgcgaccgcctctctggctgttctcaacgaagtactacacgcgctaactcgtctaaattaactgcaattgaagaggaatctcttcaaaaatggattctctctatggattctcgtggatcagctccccggccctctatggtacaagaaatggcgaatcttcttcttgaaaagcgcggaactaccccagtcattttggttggcgaaaaatgggtttacaatttcataaaacgacgccctcttctttcctctcggttcttaagacgttataattatgagcgcgcgaagtgtgaagacccaaaaatcattggagaatggtttaatcttgttcaaaaaactattattcaatttgggattgacccagacgatatttataacttcgataagaccggatttgcaatgggattaattgtaacggtaaaggttataatcccggttctttcggttggcgaaaaatgggtttacaattttataaaacgatacccttctctttcctcgcggttcttaagacgttataattacgagcgcgcgaaatgtgaagacccaaaaatcattggagaatggtttaatcttatttaaaaaaccatcatttaatttggaattaacctagacgatatttataacttcgataagaccggatttgtaataggattaactgtaacggtaaaggttataataagaagtgaatactacggtcggagattacttttataacccggaaatcgcgagtgggtgactgcaattaaatgtataaactcggcaggatgggccctccctctgtgtattatttttaaaggtaaggtcttccttaaatcatggtttaaaggccttcctagcgactagcgctttgaagttagtctaaatgggtagatatcagatgaaataggccttcgttggctacaaaagctctttattctaactacttcttcttgtataaagggagtatatcgacttttggtactcgatggccatggaagccatttaaccctaaaattcgatgagatttgtgagaaaaataagattataccaatttgtatgccactgcatttatcttaccttttacaacccctcgatatcggttgttttgcggtggtaaaacggtcgtacggccggttggttgagataaaaatgcggactgggattaaccatattgataaacttgagttcttagaagcatatccctctgtacgaattgaagctttaaaattggagacaattaaaaatagcttcttagcagctggtttaatacctttttcacctaatcgggtactttcaaaactcaatattcatcttcgaataccaaccccccctcccagcaggggtagcgattcaagccggaattttaccccaaaaaccccttttaatggcaaagatctacgtcgataggcttcgtcaatcaaagctttacttcgtacccaatctcgaagcctaataagcccttctaagtgtgcattagatcaacttgtcaaaggctgctagattgcaatgcatagtgctattctactagcaaaagaaaacaaggatttacgggatgaaaatgagaataagaagcaaaagcgggctagatctagacggcagatacctgccgaagaaggcctctcagttcaagaagcttctgaaataattgctagactggtggaagcatcagaaacacccctatatcccccggacggaagcactcaatcagggttggaaccacgaccacgggctgcaccaaggtgtagtgggtgtggaaagatagggcataagatcaataggtgttcagataaatgatcctttttagtttaattaatttaatggcgttttggttgaaatatattccttagaaaactatactcttgggtagggtggcggctcgcttacagtggcggctcgcttaccgattacgttagttagttacctattttaccatcctccttataatgaccgtcgctatattactttccctaattaacattagttcggataccactatagaggatatagtatctatagtagtttcgggcatatacccctcttacttaatagtttctattttccttttttaccgccgcgtccgtggtgatatctcccgatataacgataacgaggatgatattattaacgtgcccggtataactaaagcttatctagggatccttccactacctcggtatcattagtaccatgattaacaggtatacgatcatctatattagcattgtcatctttttcagcttctggccaagtataatagacccaatagtagagacaatgaactagagcattgtggcaatcgggggcagcgtcttccttgccattatatactacgttgtgcgcgcccggcacatctacaagggtcctattgtggaagtctccttatagagagttgttgcatagactttgagggagaggctaatagttcatttttagcttttcataacgggtaattaaagtcaaggtggtaaacataagacattagtaactttgcactccaattgagctattctcaaaagacaccaacaaccctttcccgtcgcctttgtgtggaacgggtgatacgcctgtaagttcagacttcgattcatggttttcagtacgaagtgacgcaggtatccttgcttgaggccaattgggtcggtctactctccatgttcttctatatacagccggatacaatgttggacctggactcaacgcacaaggtcaaacaacaaaaaaagacgcgttcaggacgctggtaactgatcaatacaaagtaatatacagactgttaaccccttccggtgaagttaacaagagcacctaaaacctcactcaaataacaccacagcatgagtggagtccgacatatgcaaatggtggtgcgttttcaactttttcaagtcgtgttcaatagtaatccatcccctggatacctcttccctttcctgggccgtggattctcgcatctcttcgagtccttgcgaaattcgacccattacaatcatgcatttttgatgtctgcctagcgagtcattgatctctctgactatcccgcttaagggatatcctgctagaccccataaccctgattaagattagcttgtaaacaataagatcacagaaacattgcctgcatgttccacatacctgctgtcggcttgagaaacaacccaccgattccttttccgacacctttgagaagccccttagcacctccgtgcttaagaccatgatgcggctgtgttcctaggcccttaataccgaagtaaaatccatctcggaactcctgtacatatgttagaatatctggccctagactggcgctggtatggctgttactacctttcctgccgccctgaacccgcttcgaagactgaccacctggggggtgtcggttactgtcgtgtcgtgatataatttgggtgcgttgtggaaacctctggccatgctcagtgtcaaatcggtcggtaccactatgattatcttcaatattttcttggacatttgacttccgtgtaacgcagcttcgtgtaaaatagtagatttaggtggatttgtcggtgtcatcgagctgctcattgtcttggccttttcgagctggatattccttttgcgttctgtgctccgaattcgatcaatgctgttgatatcggtttcattgtccgcatcggtagtatcttcctgtgcactctccccttctaggatttcaccatctcgctgttcctcattctcaatctgcaattgctcgttctcattttgaatatgtgtttcagtcccatcattattctctggagataaatgatctggtgaagaaagtactgcctgacatgctgcgtggcgatcaaaatgttcatggggttggcgtattgagcgagcagcagaaacaatatcatgcacaatctctctgggcgcatcgacaagcccagtcacgaagctcgtaatgactccaaagagcacctgagcactagcagtaagtgggtcggcagggtccagcaatgtatcatactcaattggacggtaactggaggcgaatcagcaagaaactctcacagctgtggtgactttgtggaacaagacttacagcacgagcatatctgggctgatcttccctgatctcactagaaccgttgctgcaaaggcactgaggttgattctggtatgtttgagatgccaagccgccggatgattcgggactatagagcatctgtatgactgggggtcaagatttcgatgaaagctattcaccccatggcgcacaccagactcttcctgcattttcaacgcgatcgtctgtgctctctctagagtactcggctctagcgctttcgcgattgcgcttgagagattctgcacgttcaaaattttatgtggtattggtgctggcccagctccagcacgcgcaacgatgtttccccagaattgctggtctccaaagaaagggacaattattgtcggtcgacctagcgcgagccctgccgctgtggtgccagcaccaccatggtggataacacatgaaacctgcccaaacagccaatcgtgagggcagtttccaatcatcagaatattgtccggcacttcgtctgcccccaaattcccccagccttttgagataagagcccgctgtccggaatttttgactgcttcaaatatggtttttgtcagtttgttcgcattatcaactacgatcgagccaaaaccaatgtatattggttttggtcctgcgtcgagaaatgcagctatttccgttggtggtgtgtagctggtctctgagaggaggaagccaaagccgcatacatcgatgttatcagcccaatcagggggcttaggtagtaatgaaggggacctgtttcaaatattagaatacttttgccaaccaggaatatgttactaaccacatatacgtatgtggcacatgtagtcggtgtagtatgcttggggcagtcattgtatccaggggttggagtgccaaggtatttttgcgaagtgtgttcagaatatctcctaatccttcccataccatcatatcgacgatattgtaggacacgaaatttgcgatagttggcttgcagttccggcggtggacattcgctaacgggtggggaaaagactgggttggtgaccagggcatcctattattgattaggtgttcagtatatgaaaggcgcatagagattactatataagagggtcaactcacgtgaatatgatatggagagggatacccagtcgttgggcgcaatggatatgggcaaggctaggagggtttgctataatagcatccgccacaaagggccgctgtcggtaatccactgtcttactgaatgggtcttccttaatctggtgaaggtaagtcccatcacccttttcaaagcaagatttccaacatccattgaagatttccttcatctcacggcgacgcctctggatatctccgctgcgtattgccttgaagcccggtaaaaggcccggatttttgaccatataagccatcagctcctctgggtctcctccgatattgaagaactctagaccggtatcgagaacaaactgccgaaaagctaaatgtgtggccaatctgactcgatgaccgtgtgctttcagttctttccctagtgccacaaatggttgaatatcgcctcgagaaccaataacttggatgaccaggtttaagtgcagtgggaaatgctcatcattcgtgtagggccgttccgcgctgacagcgcattcggaatctcgctcagaatgtatatccgcgcgttggatgtgctttaatagccctccgaggtgcggtttatgctgatcgatatggatatccactcggccgtcacctacaacaaaatgtgatcccgttagtgcaaagtcagtgattctcgccggaacattttttacctagaatacgggcgttcaacccatcctcgaagaattgcactccatcggggtcatctgatgctcgcttagtaccttcactcgcccaatcacccgagcgattgatgtccattctctcgaatgatatttctgcaggatttggtgctagtacagttgccatgatcgacaggggtatggcgcgtgggatggttagaggaataattgtgagattgacgatcaggaaaagcgatggtcaagacgaggcaagacaaaaagtccaacacgtggcgaggtctccttggactctcgcactctcgccttctcgtaactctgacaaatccaagttcaaaatgccattcatgttatgttttggtggttaatgacgtctgtagactgcttacgcccaaggtatgtgaaactttagctttatgtgaacgatcgctgggtctagatcaccttgctcgtcagtcaatgcctaggtcattctcggtcggattatatttactggtaacaagtagaccgcggcacggtttacggcagtctgcagccgccagtgcgccagtagatattttgcccaactcctctgagccaggggagaggtatcctagaagcgtttactcgattcagtggagatggaatctgataaaaaaaaaaccaccagaatctgatggaaattactaggttgctgatacacgaaaatggatgcttcccttttttatgaatgttccttcctaataatatccccccgctcgaaagcggtcgcccggaggcctccttctccttctgccagcattatccgtatttcccatatcccctcccacaacgataatgaaacaatatcgttatcgtactatatgccgcagcctaggctcaatatgacggctgattttgtttccgctgagtatcttccactatatgcgattgcatagagccaggaggtgagattgcagaaactcttgaacggcgatagaaggggactgaggaggcgttggatgactcgtgcagtttgactgggatctagggatgaagcccgaatcatccaaccagggctttctcttgaatttacagcgaacgaggacggaactatattcaaagtcttcggccaagggcatctgccgctcgcgccagaatccggagctacgttgcagcggagccagatttggcccccgtttccggctgggatgaagacactaccatcaactgcctatgaaggtttagtgtgtaaaacaatgttcccctcctcttcttccgcaagcttcgtatacgcccgtcttacatagaacacaaaaggctgctttgatgctgtaaatcatagattggaagatagtccaaatacctaaaacttcaatatgacatcgttaaaggacaatgtcaattatgtaaccatcccgttaaactctggaaagggcctcagaagtaacaaaaagctaactcaatgatcaatcaagaagaacgtatgaaaaacaggtaagacagtaagtgccaatatttcgacttgcagagaaataaatcgggatattgatgccataagacctaatcagctccagaaaggctcctgcaaaatcttgaccatggcaatgttttttctcttgtcttcttccttcttccgatttaacttgttcagcctgtacggggtgatagtggcgggaaattcctaaatcatagattggaagatagtccaaatacctaaaacttcaatatgacatcgttaaaggacaatgtcaattatgtaaccatcccgttaaactctggaaagggcctcagaagtaacaaaaagctaactcaatgatcaatcaagaagaacgtatgaaaaacaggtaagacagtaagtgccaatatttcgacttgcagagaaataaatcgggatattgatgccataagacctaatcagctccaaaaaggctcctgcaaaatcttgaccatggcaatgttttttctcttgtcttcttccttcttccgatttaacttgttcagcctgtacggggtgatagtggcggtaacttcacaccctaggtgagcatcctatgcaccgagggcgtgagtcccactcatcctgggtgagcttacttattctaggtcgcgttagcatattaaatttatatagagttttctaattacggatttctatatcgattctaatataagttgtggcacctatatacatctatcacgggtaggaggttacttattgaacgaccttaagaagatttgttaaagcttaatatacttcgagccggcttttaaagccatttttctagagggaagactcggtaatgaatacggacgaagcaattggctagataatagaattttgtacaccaaaatttatcccgaaagtagagcattaccgttattaggcgagtttcgactataagggagctagtactactcttgaaccctaattataataagatgtttagttagaactttctctatctgctaaacaatccctataaaataatcgagttccgacgcggagcggcgagtactttagtgtaagacgtctttatttatatagagattgcgatgtcctttctcgaagcctaggtccgactaggagatgtggaacgtcttaagagtgtgcccgccactattggcggtctttagtgattcatccaagctgcgaagctgccagacggcattactagattatttgactcccggtatcttaagttattcttcgtagggaagaatcaaagtgcattccgtgagccaaaaccgcttggtaatctttcaccaatttttcacatccaggctaataaggtttcatcgctgcttcaaggggaaaggcatattgaatgattgattgattagatgtgtgtggcttgagtacggctgagcggacggggagccctattttccacaccctatggtcgtatgtgttaggtcagtcacgtgttagatatcattatagaatgaaatcaatttagggaattggcgagaagaaatttaagcaggtggggtccacgattacggagtactctaaaccattatgtgatttaataatgaataggattgaggaccaaccgctctctttttagctgcaagaatgcacgaccaagtagtataagtgggttcatgcggggcggccacaattatacgactcactcagctccaatcccagtcgactagggtacaggcccaagctccaaatcttcataaccgctagtgttcctccgtggctccctagcgacaacatatgatgtcccaaagggtaccccaaatgccgcccatgaacagcgcggtgcccaagcccatccgctgtggtctaggaattccccagcatgagacggaacgtgataccatcgaatcgcaaaccaggcgaagaaaataccaataagacttccgcccataatgtcccagccagcgtgcatataatctgcatacctagtcgcgcagatgtagagggctacgcctataggagatagaacgagtagaagaaggtataggggcggagcggttgcggacgagcgagtggggatggggtcgtgtgtagtctgcgcgaggctgttatttcgatcccgctgtcctatttggggagtgagacgaaatggcataggaaagcgaacggcaaacttgatgctgagccagagggtgaggtagagaagcccggcccacgagaacgatgagtggccggatggaaaggcggcgaacccatccttcacaatactagcatcggtgtttcgacatatgctgctggtgaccatgataggggctgatgcctgcttgagaccaaggcccccaacaatgtagtcggcaacgtttgagagatcagggtcgcagcgggcaaggaagtccggtcggggcttccctacgacatcctttaggccagatgtcacgaagaaggcacctgctaaactaaggccaagtcctagccatcctgcatgccattcccatagtcgacgtctccacacgctccctccgtcaccgtggctcgatgttttgatggccgatgaagggatcaggagagatagtgctaggattgtgatggcaggcgcaccgcaagcgacgattgcaacgacggtgatgctgacagtatcggaaaggaggggatatgatatttggggatcttcgagagagaacgcatggcgataacccgtgatcttgtacaacacaccacctacagcggcaacaaggcttcatatttcaattagtaagggacggaggagtcctatgggaataatcgaacgaacatgatgatggcccaatcgagcacgtaagaaaatatcaactgaatagaggatctctctcctgaaaggagcctactatccagatttcctggattatatgccatgggtagagatttgagcgggtagtaaaagtcacgagagcaaaaggcgaggtaggaaaagaacacgatatgaattagcttgaaaaactattggctggattactggcgcctttgacatttacaaatagacctgctagtttcagatccaatctaggccgcggtttgcggaaataaagaaagccgagggcattcctttgggagcgtacagcccaggccccacttagggcatacaggtccatttgctatggaccttctaataccgggaacattaccatatatcgtagatactgtagaagcacgtgcgcagtttccggtccataaaagttggtaactggactgacttggacgacaggatttatactatttacatgcatcatgctctgtccgttgatccaagtctgtttttgttactttccattccacggagttgcctttcaaacggcatgcaatgagttataatgcaaccgaattcttctttaggggagctaggtcactagttagtagcgtacccgatgatgctaacaagaaaataaccaaataagcctggtttcataccttccgtacccgccactggggacgaattggtcactctgaatggctttgcaaccctccattctgagttgcctccgaaggcatcaaaatggcaatcctgctgccactttgaattgagtttctggataccgggttgaaaggccgctgtcaatccagccattcacttgtctgtgcgcacggtactcttcttccaggtcgtggatatgtactttcaatagatagcgcggaaatacaattactaatacgataaccatggcaatgcggattctatagttcatggtcatgatagaagcggttggtgatgtgaaggctttcgggtacactttcattgataaatatgtcgacagataaaaacgaacgatatatggtggtggtgttgcccaataggaatccagacaataccagggctttatccagataactcaatgttgccaacttccgacttccaatccaaatttacaacaattcattcttggcacgaaagctgggtttgtaccgtacattgtatgtgttccgtcaccggtcaagcaattccacaaaagcaggtagagataaaagatatcggatttaatcttgcagcgaatataggcagaaaataacaaacctctaatcaaatcccatagggccaatgggagggttaaatgaaggcacgtgatactgactgtcgatctatagacgagggaataggcgtggcagtttctttgggaataaccttatcatcgctatcattccctgcaaagcactgtacacatgaccatattgtcgagagatcccactatgaggcttggcggtaaacaaaaagaataaaagaagaacatagtgcatggaccatgtctccacaccgcactggcccaaatgggttaagggggttaattttaattgatgaccctgcaggtaaccccaaatagaacagaagaatgtcactcgcgccacgctattcgtcacaggtaataatatccatctgcctggcgctctcggcaactctcgccccgtcagggttcagcctaggcaaacccagaatctccacctagtagccgataaaccctttgacagaaaatcgtggtacggcgagtgtattggtcacattcaatggcagtaaaatctctaactaaaatcaacagggtccgaaattgacaatttgcccaggtggtacgacacgattagtaagcaaaatgcagataactacaacatacaagtcacaagcggtctgtaaaaagacaggtaaagtaaggtaccaatcgtgattcttgacaacctggtttctatggcgccggtatggagtcaaacaattctgctgcctaaccaagtgccgtgggagatctgtattggttagaagagggcgcatttggattgccagaaacggcacattgcaagtgagcacggcccaattgtttggtttatcttttttatctattaccaacttgctctgagacacggatcggatttctatcatggatatgcttctggtggcacgagctggtattgtttgttgttaagaagaagcctgcagctgatacgtaacccgccagacggaggtgagaaccgtatcgcatgctggctttgcgacaaggggtgagcgtggaacatcagcgaggaagaagcgacacgatctcaatgaagatttagagagtctgagggggccgtgaaaatggggagacgcgtacttgtctagatcagactcctgaggcagtaggcgaggtatcccagtctgttgaacgtcttatcttgggatcagagcactggcgcatgggctagcgaagcaggctagctttttgtttttcgttgcttgttccagtcatattccatactgcggccgatttttcggtttgatcccgcttgcttcggggtcaatgaaacgttatatattgcacaggcgagcggcgcagtccgaaacacgtaggaaatgcaatataaaccgaaaagcaataagctagcaggaaaactctgtatagcctaccgttgttgaaatatcaagttgtgatttatctcatttactagtgtttcggactctgccactcgcatgtgaaatacggtagattatgcgtctgggtgttctctgaaagttcttcctagcccctttctgtattccaagtgtagatcaacgatctgcatgtactgagtagactggacggagctagaccagtacagtatcagccgtttccaaaattcccagacactacggagtacttctttcccaagcacggaataaatccgcaccttatccgagaaaccatcgatactccatcgatagcaaagtttcgtacgggaaatttaggtgcctagcaccgcttgggtgggtgatgcagggacacagacccaaaagaagaacaagcagcgactaaaaaagcttggcctagtagccaatcagctaataatcttcgcggtggcttttcatcctgcttcccacttttcgagtgttctgatagtccacaatcaattcgggcgtcgtaagctcttcatctaccagcaatggacttcggcgaggactcggcaacacggcctctggacggattaactctcccttgtgtggatcgcggccaggtgaagccggacttcggttcccatagatctattgttgcagtgaattttcatgatgtggtactttttttcctatctctcagcggtacttgagaatctgcccctgttggtgggagcaaggatctttttctagcgctattttctggttatcagtcctttccctcattaggctttgcgttgccaaatgtgccccgacttctcaagctcaagagctctattcaaaatgtttcaattattcacaaggtttaagcatcctaacactgagagagtcaaaaaaggcgttgcagcgccgccactccactacgccaaagtctgtcgacacggaagatgctttcgaagcagagttggcaggcaatttttcgttgagtgttcttggggggactcagtttaaggcagagtcgaaatatcttgtcaacaaccaggaggtcgttcacgccatcatcttacccaattataaagaaaattttgataccttatggaccacgctccatgttctagccagtcaccctatagctgccagtcagtatgaggtgagttccgttctagtcgttcatttcttcatgaaggagctatattgaccgatgattgttccaaactagatctaccttgcaatggaacaaaaggagctcgaggcccctgcaaaagcggtcagtctagtttcagcttttgaaaccagattttcttacattgaagccacgttccatccgtctggagtaccaggcgagatagccgggaagagttccaacgtcgcatacgccgctcaacgtatcatcaatccacacagaagagacagcagggaggacttggccagtagattaatcactgttattgatggtgtgtcgagatatatccatctcctattaagacttcaccatgctgataacccttacgggtagccgatacctatctattgcaggattacttcaatgggtccaacgacttcacttcgacgatattgccagccccgaactatccttctatacctgtcccatcatcttcgatcgaaactcatccgaaacaccgattctagtccgctgtgcagatatgatgtgggcattcgcaggtgtctcagccatgtaccctagatccccgatctccattcccacctccgtatatactcttcctctcagcatggcagaacgagttgggggatggaacagtgatgctgaggcaattggtggagatatgcatatgcttctcaagtgctactttgccatggatggcaacatcaccacacgtgttgtcgcaagcccagcgagccaatgtaatatatccagcaatgagcatcgtggctggcgccgggacatggatattttggcagctcgctatcgtcaagctttgcgccatatgtggggtgcactggatacgggatttttcattcggcagagtgctgccaacctgtcgcatcccagctggcaaatccttttcagcgggacgcaatgggcccttgcgcatcttctcttcgaagcgcacttccttccttgtcatttgataatcacgttggctatgtcatctatttatttcgctttcatttcctcggagtctatgcatccggatttggagtgggcatttcaattcaccggcgttctggaggtttgttctttcattatgatgaacatctgcatgatagtctatggaaattggcataatttctgcgtcaatacctgtcttacggacatgatggatgccgttgtccctgatgcgggcttttcattccgaaatgagtggaatggcggtactcttctcgagcgtatcctttttcccatggcgggaacattgttcgggcccgtcccggccatccaagctgtcttttctcatttctggactgatagattggtatataaagtaagccgaaagccaagcttccgtccaagctctgtctaaaagatatatcttctcttgcaggctgagacttgggtttccatgtggcgatgagaaatggtcttcagttcactccagttctggcttttggtctggtattacactcattttaagatagtgtgcacaggaattttatagattttctttctgtatctctactgattgaatacaatttcttgggttgctgctcaagtcagtagatagcctcgtctcttcctctcttcttctcctatctgtccgcgatcatcgtacagaatatcacccacagtttctctttgcatctaaattctgtagatctagacatgtgcactttttcatgcccgtgattgctcccctgggtctttggcgctgattgaactgattcatctaaccttccaatgagcaggtcttgttttcaatacgaaatcgactgtggcaagtaagcttggtggggaagatgatgatattatgaaccccttgttgggggtgctaactagctaactatgactaagctgtgacannnnnnnnnnnnnnnnnnnnnnnnnnnnnnnnnnnnnnnnnnnnnnnnnnnnnnnnnnnnnnnnnnnnnnnnnnnnnnnnnnnnnnnnnnnnnnnnnnnnnnnnnnnnnnnnnnnnnnnnnnnnnnnnnnnnnnnnnnnnnnnnnnnnnnnnnnnnnnnnnnnnnnnnnnnnnnnnnnnnnnnnnnnnnnnnnnnnnnnnnnnnnnnnnnnnnnnnnnnnnnnnnnnnnnnnnnnnnnnnnnnnnnnnnnnnnnnnnnnnnnnnnnnnnnnnnnnnnnnnnnnnnnnnnnnnnnnnnnnnnnnnnnnnnnnnnnnnnnnnnnnnnnnnnnnnnnnnnnnnnnnnnnnnnnnnnnnnnnnnnnnnnnnnnnnnnnnnnnnnnnnnnnnnnnnnnnnnnnnnnnnnnnnnnnnnnnnnnnnnnnnnnnnnnnnnnnnnnnnnnnnnnnnnnnnnnnnnnnnnnnnnnnnnnnnnnnnnnnnnnnnnnnnnnnnnnnnnnnnnnnnnnnnnnnnnnnnnnnnnnnnnnnnnnnnnnnnnnnnnnnnnnnnnnnnnnnnnnnnnnnnnnnnnnnnnnnnnnnnnnnnnnnnnnnnaacgcccggggtcgtacggtggcccctcggtggccgcttcgagaggagcttcgcagtggttgccacgttcttcatcgcctagcagtaacgggctccctggttgggcttggtcgtcaggagcagcgctttgttgaagttggcaggggcggtggaacaggttttcccagcgtctgatggctcggcgctgaatatccgggaaactgctgagcgtgttcgagattgtcataagggtgccagcggcaacggcttcggtcttctcggtcagagcggcctcttggagttacagctggcgatatctagccatgtgttcgcgtaacctttttaaatcctcgatctctggctgtacccggtccatatgctccattatgcctttgtagggaaggatgaaatcgcggaggatcttttcctcggtatcagctcggcacagttggctttgcacggctggcaattggctctgaggttcaggaatgtccggtgaagagaacggagcggaagagctgacgctgatcgcgtcgccaggttggaaacccgagagagatcctctcggaagaaaaaaaactctggatgaaaccaggacgtgctaccataaatgtggcaagtaagcttggtggggaagatgatgatattatgaaccccttgttgggggtgctaactagctaactatgactaagctgtgacaatatgccgggtctcaaaaaatctcggcctccggctgagaaaaaaaggaaatttcaataaaaaataagaataaaaaatgataagaaaacgaaaaacgccgtcagttgtcgcaggcccggggcggagtatagatgtccgagggcgtgaattcacgcccggggtcgtacggtggcccctcggtggccacttcgagaggagcttcgcagtggttgccacgttctttatcgcctagtagtaacgggctctctagttgggcttggttgttaggagcagcgctttattaaagttggcaggggcggtggaacaggttttcccagcgtctgatggctcggcgctgaatatccgggaaactgctgagcgtgttcgagattgtcataagggtgccagcggcaacggcttcggtcttctcggtcagagcggcctcttggagttacagctggcgatatctagccatgtgttcgcgtaacctttttaaatcctcgatctctggctgtacccggtccatatgctccattatgcctttatagggaaggatgaaatcgcggaggatcttttcctcggtatcagctcggcacagttggctttgcacggctggcaattggctctgaggtttaggaatgtccggtaaagagaacggagcggaagagctgacgctgatcgtgtcgccaggttggtcctgcgtggtgggctggtattcttgctgagtaccgtgactagactaagttggacgatttgtattctggtatgagcgttgaactgggtctatgatctttatctttttcaggtccatttgggagaaagtaaaagacagtacttcagccgagcataaaggagaccacgtggagaattcccagaaaaaaccataggagggtcttagtccttgtaggagtatagcgacgtggtagtgattgtctgagccgatgtccagtatctttgagttcgtttcagctttctagagtatggtatactgaccgtggtggttatgtaattggtataccacagaacgggggtacggaaatttggcttgttctttagcgtggtgggcttggaataccgctgctgggtcagtaactgtatcctctgcgaaaggataacctaggacgataggtccgattgtgaaaactgggttttcgattttaagctttaaatctgccttcgggactattaggtagctgtattttgcggttgcacgaaggctaacgaatgtatagtaacgtttccagattggcgtgtatgggagaccatagaagtcgatttatgggccggggtcctgtggtatcctactagcatgtggtttaccgttggtgtcccagacggtacggaactcggcgcgctttttctgagatagttcctttatcgctgtataaataagctcgttgcttagtagaacgttgcggtcgttaggtagtactagccttccttttgggtcgcgcttgtatctcatatataagggcaaccgagcgatatcttgtggagatagtctactgcctgtgataactgggacccagtcactggtctagattggcctatccagttctagtttagtacgagcggtatcacgagattgtgtcatgtaggaatcgtcgaatgcgtatcccggaaggcaaagtatatcagtcgctccctgtgatggaccaaggtacgggagtgcctttctttttggtataatgagtctggtgtgtaagaaagagaatggttaatgtgaaaaaagaagtaatggaggtaggaaaaatggaacaggtacgttaagcagcaagtaatagttgaatgagagttagaaactcaaattggagtaaaagtaggagttggaagtaagagtcaagtgatgtgaggtagtgagaatggatagtaataaaagtaaaaggaaagtaaaaataaagcgaggaaaatgtggtacttaggagctcgctgggggtacgccctgacgctcctcgaagtctttgatagccttgttacatccgatgcagtcctcttcccgcacctaatagtcgtccctagctgattggcctttctagcggattagatacttagtgatttgatgcctagtactgttgtgacggggtcgaccaggcgcgttgacgacgcgcttggtaagaatgcggtcgacctcgtagacgatatctttggggaaacgctcgtctgtagtcgggtggtgttcgtcatctggttggcgctcccaggggtcgtcaccgtctggggcgggttctaggtatatgatactgatgactgggtggattcttgactcagttggaatatttaaacgataagcaagcttcctgacgcgttcgagtacttcgaaacgcccgatgtaacgctgtcgtagtcgccttggtaaaacttggttcaacggtgtgtcgtatccgtgtcccagcttaagatagactttgtcaccgatattgaaaaaaatctgcctgtgatagcggttgtattggcgttttatacgcatggcagcctaagcggcagaatgctcggcatctgtacgcgcggcgatgtcgggagctgtggcttggtgtaaaagcgactaagggtggcgtagttcgatactgtataagagtttgtaaggtgagtgacctgtcgttatactgactgagctgtttagcgcagcttggagggcgggtaataggtttggctaatcttcgtcggggtgagtggcgattgtgtgccgtatagtaacttcggctgtctggttagtatgttctgactgactgtcagtttgtgggtgataggtggtagtaaaaaacaacttggtgtagatgaggtcgaaaagtgctttccagaggccctgtgtgaacttagggttgcgatcgctgataatcactgtaggaatcccctaattggctgtctaccagaaagagagagtacccagcgcctaatcttcactgtcccagtctatacagccaggtattattcccatcaacttggtgaacttgtcggtcatagtcatggctgtgttatatctgtcggtcgaaatgggtatcgcgacgattagatctaaagtaatagtgtgaaagggtatcggcagggcgatgatcggttggagagaaccgtacgggcgataacggcggatcctgtactctaaatagatagggtaatgtttaatgtactgctttaggagcttggcgcctttgtagaatgtgataccgcgaagcttatgctaagctctgtcgaaaccctggtacatctgctcgtcatgaaccaagttgaaaatttcctgagtcatggattggggcagatacagactctcctcactgttagaatttgtgaaaatgatcaagctattttctaggtggtagggtaacttcttaacttggggatcctgttgggcgtcaacgctttctagagtgtcgattagggctgaccagcgagtgtctgactggtatcctcgtaagatgcgatccttagtgtcgtcgcttagctggagcaccgatgctgtaaggaggtacgctgtgggttggtctactgtaggttgtttaaatatatacggcgctgggatatcctcgagattgtcttgtgtgccggggactgacgggtccgtatatagtaggcgggaaagagtgtcagcgatcttattagtttttcctggtctatggaagatgtgtaggcgaaactgttagatgaactgggacgcacggactaggtgaagattttagcgttctaaagaaatagaactcaagtttgttgttttagcaatacctatagtgctactatggtcggtgtataccacagccggaaggttgctaggacaggcctctaccaagtggcgtaccttgcggagggtctagtagagggcggaaacctcgagcttagtgggctagtaattcttctctgcgtctataagaagtcggctgaggaatatgatcggctggatctctgtagcagggggtggttttgaaatgtccttatgagtgaacgttgtctttgtatgatagattgtggcactgtgccctgtttcctttgaaccgtcggtatcgatatagagctggtgtgtgggatcatggtgtgctagccatttaggttcgtggaactcggcctggagtagacgaaaactcttgagctcagcttgggagggtttattgagaatggcttgtgcgctctacgctcggcgctgggggcctttgatcgggctccctttcagtaagtttgtcttgtggacttggagtggttccgatttctgtgtgtagcttttgatataatggcgaagatcacccgtcattctaaggtatgtttctagctgcttacatgtgcgcggaaaaaccagtgaggttattgcctttaccttctcggcggttgttaacatgcctacggagttaatgtccttgcctagtagggtcaaacttggaaacctaatacgcgctttcttcgggtccagagtgatattgaattcgtctagttttgcgaatagtaggtggagtttagcaatatgttcgttaagtgtatcgccgaccgcgaagatattatcgatgtaggttcgacactattctcgaaacgcgcggagtatattgtctatctagcgttgtatataggcgatggagtttgaattgcctatggtaacgacgtggagaacttcttaactgtggtgcgatatgacagcttagtggctataatagtcggggtggatgtgctattgatagaagaattttgccgtgtctacgattgtgatgaaacgcttgccttttgctaaagcaataatctcgtcttgtcctggcaatgggtataggtctggaactaagttcttatttgtcgggcggttgtcgaccatggcgcgaccgacccgttggagcttggcgttacctttgtcgtctatacgagtgacccatttctatataataaaaatagggttcacgccctaggcttggtatttagtaaacgatatctttccttaagcatatagagtatcgaatgtattgtcgatgacttgttggctttctctcgcctatctgtagacttgtgaacgctgtggctttgaaccagggactattgggagtcttatccattcgtcttataggatatctataacactggggttagaccaaatattatattgcttataaatatcgcggagtactgcagctgttttaggcgtcccatagattataatactattaggtagtactgtttctagtggatgtcccggccgagcgtaggctgtagatattggcaggaccttctgtatgtccggtgtgaaaatagtatcaggaagtctattaggaagtctatctggcagccggggcaagttgttaatagcggccagataggcagtgacagagtcgtgaacgtctcgattaatcaatggggggcggggctcgaccgcttggggctgcgatgccagaggcgttacttcggtagaaacttggtaggcggatgtgaagtctggctctaaaagttggcttatacgatccttcttcctaatgacttgtgttcggtcggtgttgttaacggcgtgtatatatgtgaaaccggcgtcaaccatctgtgccggaatcttaaacttgctgttgcctggcttgaaaacgaagtcacgatccttcggtaaaatcgacttcacgataatggggatctgtgccgcctggcgtggggggacctcgattttagaagaagtgtagaccggtcttttactcatgtggtgtggttttgcgcagagggcaataggaaaagtcaagttttcgcaggacttaatgatcgcctgggaacgtgggaaatcgagtataaacccttctggtcctagaacatccataccgataagaagctgggcacagaggtccttgacgatgtgggcctcgattcgtagctctgcggctatatctttgttcaggaagtaaacttgaatcacgatgtagcggtcggataggtgttgggaaccgatcctacttataggaatcgggctgatagggtactgggggtattggagtgatgccgctagctttgaatcgattaaagtcataacacatccggagtcgaggcagcaagtgtttagcttgctggggcttccaagtccgactgtggccgttgtatatcgccaggatcgaaatgtatagccggggacgtggtcggtctgtctggccgagtggatgatgcgataagcgggattcgcgaaattagcgatagctttagctggtatagcggcagcagcttgaggcttacagccgttaagatgctgatacagcttggtgttcgacttgaaaacctgtaaataggataaataagtgactgagtactcgctgtcgactgtatatagctgggcctatgccggcggatcggcctgggcttgaaaaccggattggtggtcgttatcctgtaggccggtagggtcagcgaaattcgcaccgtatgggtccttgtcggtgtaaaagtcgtcctcgaaatcctgttaatcgttgtcgttaactaggacgtcgtcctgatactcctccaggctattgttattagcttgggagtagtcatttgactgatgatagtcagtatctgtatccatgtggtatgcccgctgaggtttattccaaacagtacgctgggagttcccagagccgttacggccggactattggcggccaggattgttccaggtctgctgagcttgaactccctgctatagacgttgttgtctctgaaaggtttgggggccttggttgctttgtgctgggttctggggctgatactgatgggactgatattgggctcctgtggcttggtatgggcgctgaggagtctgctgagcctggccacggggcgctggagcctgttgttgtctatatccggcctggctttggggtagaccttgatagtcttgggctggcgagcggttgtagccgtacgggcgctgagggtagccttggcgctggtcttgtcggtgatatggggccgaattgtcctgtcgcggcctattgtttctaaacctggtagtcaactgactctggcgcttggttgccatatctttctagtcttgatagtggtggtcaaggctgttcatgaaagtgactaacgaggtagtctcagttggctctgggatgtcgcgacgaagcgtaggctctaggttctggcgaattcgtaataactggtcgagaacatctgtcgtacccgtagctttgcataggcgtaacataccctgcgcatattctcttggggtgcggcctcggcgtacgtcatcccattcgtatgtgtgcttgtcaagctggagaagggcctcggtacggttgggtctgaaacgccgcgtcatcatggaaaaccatccatcctggagcggaacctggttcataaggcgtttttcgtccgtggtcagctcctgcgaataccatcggagcgcgtcacctcgtaggcagctatggatgttcgctcggacaacagcttccgacttcaggagtattaggtctgtcatacgatctacaaacgtatgcacgtcggagtagacgcaaagattttggactgtgtccattccatccttaaaactcttcgaaggatcgaaaacgccaatttcggacgctttccacgaggtatcggtagtagccaattggcctggggaaccttgctcgccctggggaccttggttaccttgaggcccgcgaagagcgttggcattgttccgaaggcttgtctgtacggctttctcgataagctccgtaaactgtgccatatcgaaaccgggcaacggtggggaagcagccggagttggcgtgtcgcctgtgtggccaggnnnnnnnnnnnnnnnnnnnnnnnnnnnnnnnnnnnnnnnnnnnnnnnnnnnnnnnnnnnnnnnnnnnnnnnnnnnnnnnnnnnnnnnnnnnnnnnnnnnnnnnnnnnnnnnnnnnnnnnnnnnnnnnnnnnnnnnnnnnnnnnnnnnnnnnnnnnnnnnnnnnnnnnnnnnnnnnnnnnnnnnnnnnnnnnnnnnnnnnnnnnnnnnnnnnnnnnnnnnnnnnnnnnnnnnnnnnnnnnnnnnnnnnnnnnnnnnnnnnnnnnnnnnnnnnnnnnnnnnnnnnnnnnnnnnnnnnnnnnnnnnnnnnnnnnnnnnnnnnnnnnnnnnnnnnnnnnnnnnnnnnnnnnnnnnnnnnnnnnnnnnnnnnnnnnnnnnnnnnnnnnnnnnnnnnnnnnnnnnnnnnnnnnnnnnnnnnnnnnnnnnnnnnnnnnnnnnnnnnnnnnnnnnnnnnnnnnnnnnnnnnnnnnnnnnnnnnnnnnnnnnnnnnnnnnnnnnnnnnnnnnnnnnnnnnnnnnnnnnnnnnnnnnnnnnnnnnnnnnnnnnnnnnnnnnnnnnnnnnnnnnnnnnnnnnnnnnnnnnnnnnnnnnnnnnnnnnnnnnnnnnnnnnnnnnnnnnnnnnnnnnnnnnnnnnnnnnnnnnnnnnnnnnnnnnnnnnnnnnnnnnnnnnnnnnnnnnnnnnnnnnnnnnnnnnnnnnnnnnnnnnnnnnnnnnnnnnnnnnnnnnnnnnnnnnnnnnnnnnnnnnnnnnnnnnnnnnnnnnnnnnnnnnnnnnnnnnnnnnnnnnnnnnnnnnnnnnnnnnnnnnnnnnnnnnnnnnnnnnnnnnnnnnnnnnnnnnnnnnnnnnnnnnnnnnnnnnnnnnnnnnnnnnnnnnnnnnnnnnnnnnnnnnnnnnnnnnnnnnnnnnnnnnnnnnnnnnnnnnnnnnnnnnnnnnnnnnnnnnnnnnnnnnnnnnnnnnnnnnnnnnnnnnnnnnnnnnnnnnnnnnnnnnnnnnnnnnnnnnnnnnnnnnnnnnnnnnnnnnnnnnnnnnnnnnnnnnnnnnnnnnnnnnnnnnnnnnnnnnnnnnnnnnnnnnnnnnnnnnnnnnnnnnnnnnnnnnnnnnnnnnnnnnnnnnnnnnnnnnnnnnnnnnnnnnnnnnnnnnnnnnnnnnnnnnnnnnnnnnnnnnnnnnnnnnnnnnnnnnnnnnnnnnnnnnnnnnnnnnnnnnnnnnnnnnnnnnnnnnnnnnnnnnnnnnnnnnnnnnnnnnnnnnnnnnnnnnnnnnnnnnnnnnnnnnnnnnnnnnnnnnnnnnnnnnnnnnnnnnnnnnnnnnnnnnnnnnnnnnnnnnnnnnnnnnnnnnnnnnnnnnnnnnnnnnnnnnnnnnnnnnnnnnnnnnnnnnnnnnnnnnnnnnnnnnnnnnnnnnnnnnnnnnnnnnnnnnnnnnnnnnnnnnnnnnnnnnnnnnnnnnnnnnnnnnnnnnnnnnnnnnnnnnnnnnnnnnnnnnnnnnnnnnnnnnnnnnnnnnnnnnnnnnnnnnnnnnnnnnnnnnnnnnnnnnnnnnnnnnnnnnnnnnnnnnnnnnnnnnnnnnnnnnnnnnnnnnnnnnnnnnnnnnnnnnnnnnnnnnnnnnnnnnnnnnnnnnnnnnnnnnnnnnnnnnnnnnnnnnnnnnnnnnnnnnnnnnnnnnnnnnnnnnnnnnnnnnnnnnnnnnnnnnnnnnnnnnnnnnnnnnnnnnnnnnnnnnnnnnnnnnnnnnnnnnnnnnnnnnnnnnnnnnnnnnnnnnnnnnnnnnnnnnnnnnnnnnnnnnnnnnnnnnnnnnnnnnnnnnnnnnnnnnnnnnnnnnnnnnnnnnnnnnnnnnnnnnnnnnnnnnnnnnnnnnnnnnnnnnnnnnnnnnnnnnnnnnnnnnnnnnnnnnnnnnnnnnnnnnnnnnnnnnnnnnnnnnnnnnnnnnnnnnnnnnnnnnnnnnnnnnnnnnnnnnnnnnnnnnnnnnnnnnnnnnnnnnnnnnnnnnnnnnnnnnnnnnnnnnnnnnnnnnnnnnnnnnnnnnnnnnnnnnnnnnnnnnnnnnnnnnnnnnnnnnnnnnnnnnnnnnnnnnnnnnnnnnnnnnnnnnnnnnnnnnnnnnnnnnnnnnnnnnnnnnnnnnnnnnnnnnnnnnnnnnnnnnnnnnnnnnnnnnnnnnnnnnnnnnnnnnnnnnnnnnnnnnnnnnnnnnnnnnnnnnnnnnnnnnnnnnnnnnnnnnnnnnnnnnnnnnnnnnnnnnnnnnnnnnnnnnnnnnnnnnnnnnnnnnnnnnnnnnnnnnnnnnnnnnnnnnnnnnnnnnnnnnnnnnnnnnnnnnnnnnnnnnnnnnnnnnnnnnnnnnnnnnnnnnnnnnnnnnnnnnnnnnnnnnnnnnnnnnnnnnnnnnnnnnnnnnnnnnnnnnnnnnnnnnnnnnnnnnnnnnnnnnnnnnnnnnnnnnnnnnnnnnnnnnnnnnnnnnnnnnnnnnnnnnnnnnnnnnnnnnnnnnnnnnnnnnnnnnnnnnnnnnnnnnnnnnnnnnnnnnnnnnnnnnnnnnnnnnnnnnnnnnnnnnnnnnnnnnnnnnnnnnnnnnnnnnnnnnnnnnnnnnnnnnnnnnnnnnnnnnnnnnnnnnnnnnnnnnnnnnnnnnnnnnnnnnnnnnnnnnnnnnnnnnnnnnnnnnnnnnnnnnnnnnnnnnnnnnnnnnnnnnnnnnnnnnnnnnnnnnnnnnnnnnnnnnnnnnnnnnnnnnnnnnnnnnnnnnnnnnnnnnnnnnnnnnnnnnnnnnnnnnnnnnnnnnnnnnnnnnnnnnnnnnnnnnnnnnnnnnnnnnnnnnnnnnnnnnnnnnnnnnnnnnnnnnnnnnnnnnnnnnnnnnnnnnnnnnnnnnnnnnnnnnnnnnnnnnnnnnnnnnnnnnnnnnnnnnnnnnnnnnnnnnnnnnnnnnnnnnnnnnnnnnnnnnnnnnnnnnnnnnnnnnnnnnnnnnnnnnnnnnnnnnnnnnnnnnnnnnnnnnnnnnnnnnnnnnnnnnnnnnnnnnnnnnnnnnnnnnnnnnnnnnnnnnnnnnnnnnnnnnnnnnnnnnnnnnnnnnnnnnnnnnnnnnnnnnnnnnnnnnnnnnnnnnnnnnnnnnnnnnnnnnnnnnnnnnnnnnnnnnnnnnnnnnnnnnnnnnnnnnnnnnnnnnnnnnnnnnnnnnnnnnnnnnnnnnnnnnnnnnnnnnnnnnnnnnnnnnnnnnnnnnnnnnnnnnnnnnnnnnnnnnnnnnnnnnnnnnnnnnnnnnnnnnnnnnnnnnnnnnnnnnnnnnnnnnnnnnnnnnnnnnnnnnnnnnnnnnnnnnnnnnnnnnnnnnnnnnnnnnnnnnnnnnnnnnnnnnnnnnnnnnnnnnnnnnnnnnnnnnnnnnnnnnnnnnnnnnnnnnnnnnnnnnnnnnnnnnnnnnnnnnnnnnnnnnnnnnnnnnnnnnnnnnnnnnnnnnnnnnnnnnnnnnnnnnnnnnnnnnnnnnnnnnnnnnnnnnnnnnnnnnnnnnnnnnnnnnnnnnnnnnnnnnnnnnnnnnnnnnnnnnnnnnnnnnnnnnnnnnnnnnnnnnnnnnnnnnnnnnnnnnnnnnnnnnnnnnnnnnnnnnnnnnnnnnnnnnnnnnnnnnnnnnnnnnnnnnnnnnnnnnnnnnnnnnnnnnnnnnnnnnnnnnnnnnnnnnnnnnnnnnnnnnnnnnnnnnnnnnnnnnnnnnnnnnnnnnnnnnnnnnnnnnnnnnnnnnnnnnnnnnnnnnnnnnnnnnnnnnnnnnnnnnnnnnnnnnnnnnnnnnnnnnnnnnnnnnnnnnnnnnnnnnnnnnnnnnnnnnnnnnnnnnnnnnnnnnnnnnnnnnnnnnnnnnnnnnnnnnnnnnnnnnnnnnnnnnnnnnnnnnnnnnnnnnnnnnnnnnnnnnnnnnnnnnnnnnnnnnnnnnnnnnnnnnnnnnnnnnnnnnnnnnnnnnnnnnnnnnnnnnnnnnnnnnnnnnnnnnnnnnnnnnnnnnnnnnnnnnnnnnnnnnnnnnnnnnnnnnnnnnnnnnnnnnnnnnnnnnnnnnnnnnnnnnnnnnnnnnnnnnnnnnnnnnnnnnnnnnnnnnnnnnnnnnnnnnnnnnnnnnnnnnnnnnnnnnnnnnnnnnnnnnnnnnnnnnnnnnnnngctgggagttcccggagccgttacggccggactattggcggccaggattgttccaggtctgctgagcttgaactccctgctatagacgttgttgtctctgaaaggtttgggggccttggttgctttgtgctgggttctggggctgatactgacgggactgatattgggctcctgtggcttggtacgggcgctgaggagtctgctgagcctggccatggggcgctggagcctgttgttgtctatatccggcctggctttggggtagaccttgatagtcttgggctggcgagcggttgtagccgtacgggcgctgagggtagccttggcgctggtcttgtcggtgatatggggccgaattgtcctattgcggcctattgtttctaaacctggtagtcaactgactctagcgcttggttgctatatctttctagtcttgatagtggtggttaaggctgtttatgaaagtgactaacgaggtagtctcagttggctctgggatgttgcgacgaagcgtaggctctaggttctggcgaattcgtaataactggtcgagaatatctgttatacccgtagctttgcataggcgtaacataccctgtgtatattctcttggggtgcggcctcggtgtacgtcatcctattcgtatatgtgcttgttaagctggagaagggcctcggtacggttgggtctaaaacaccgcgttatcatagaaaaccatccatcctggagcggaatctggttcataaggcgtttttcgtctgtggttagctcctgcgaataccatcggagcgcgttacctcgtaggcagctatggatgttcgcttggacaatagcttccgacttcaggagtattaggtctgttatacgatctacaaacgtatgtatgtcggagtagacgcaaagattttggactgtatccattccatccttaaaactcttcgaaggatcgaaaacgctaatttcggatgctttccatgaggtatcggtagtagttaattaacctggggaaccttgctcgccctggggaccttggttaccttgaggcccgcgaagagtgttggcattgttccgaaggcttgtctgtatggctttcttgataagctccgtaaactgtgctatatcgaaaccgggcaacggtggggaagcagccggagttggcgtgttgcctgtgtggctgggaccctgatttccgttgttacggctgggacccggacctctgttatttgccattttttgcgggaggtcagagagtttggcttcccgtagtaggctcgatagacctgctatggggctggcctcgctgttgtaaaaacgtgaagttaatcgtactcttgactgtaccgggggtcgttctggggtcaggtgtttaatgccggccttgtgagagtggaggtctgcttggtcgtcttcggcttgttcggttcccggagactagacttccgcctggtcgtcttctgcttgttagtcttccggagactggacttccgcttggtcgacttcggcttgttgagactggacttccgcttggttgacttcggcttgttggtcttccgaagactggacttctgcttggtcgccccgtagaaggtctgtgtggctgtccttagcctgtggtgcggaattttcgtccttggttcggaaaaacttgctgtcgtaactgtctggccggggactgaaacgaggctgccgttgtatagtagcgggcctgtgcgtgtagcgtatgatagcagtagcttgggcagtcggtcggtccgaaatgggcatcgaagactggggtgtagaaaggtgtatcacagcagcaggttgggcagtcggttggtccgatacagacgtcgaagattgaggtatggaagccggtgaactgggaggcttgctcgtagttcgcttaggtcggggtctcccgagcggacacgtaggctcgctcgacagaggggttataggacttggaacggcgaggtgagatgtcagacggaggaaatccttgacggccttgttgagtatagacctgtcgatgggccaggaaggtggaaatggatcctctgaagatggaaggatgacggaagtggatggcgaggttgagggattggcgggcccggcagggggagggggcggggacgaggctgccgtcgtgtagtagcgggcctgtgcgcgtagcgtatgacagcagtagcttgggcagtcggtcggtccgaaatgggcgtcgaagactggggtgtggaaaggtgtatcacagcagcaggttgggcagtcggttggtccgatacagacgtcgaagattgaggtatggaagccggtgaactgggaggcttgctcgtagttcgcttaggtcggggtctcccgagcggacacgcaggctcgctcgacagaggggttataggacttggaacggcgaggtgagacgtcagacggaggaaatccttgacggccttgttgagtatagacctgtcgatgggccaggaaggtggaaatggatcctctgaagatggaaggatgacggaagtagatggcgaggttgagggattggcgggcccggcaggtgaaggggttaggataatgataacgcgggaaagtgtatctgcgtcgaaatcacctgactaggggcgtgcctcctagcgataattgtcgaactggattgcaagctgggtggcccgacgagtacgcttatccatggattgttatagtagcggctcggcactgtgatcgacagccttaccgtagcggcttggcactgtgatcgacagccttaccgtagcggcttggcactgtgatcgacagcgtggtcgaccgccgatcgtgccaggcttggtgacctctgaccttggcatataggggaacccctgaggtggtcgaacttgttaaaacaaacccgagagagatcctctcggaagaaaaaaaactctggatgaaaccaggacgtgctaccataaatgtggcaagtaagcttggtggggaagatgatgatattatgaaccccttgttgggggtgctaactagctaactatgactaagctgtgacatcgacctcgtcattcaagcccacactcacttctacgagcgcaatgggcccttggacaatgaagtcattgatcctgcaggtttgaataatcccaaatccccttggtatattactagcgccgcccctggccactatgacggattggacagcgttgatacccccttgaagcctgatgctgtgtatggagaggataatgcctacgaatggagcaagatcaccttccacaactgcactcatatgactcatgaatttgtgtccagcagcaacaacactattctcgacactgcgaccttgttcaaagattgcaagtgcggttcagggaagggcaagccctggatgtgagctcgacatcgatattgagaagccaatattgtgttgttttgtaaatcattgtttcctttggggacatacggattagggcgttcagcctcgaattagatattctcatgtgtggaccagcactttcggaatgcgtttgtgaattgaaataaatttgccgcttgcgagttgcaaaatatgaacccattagtacgccatggatagatgtaaacaattatgttcaagattaattaatacccttgtaggctagactatatgccgaccccgaaggaggcgttttacctggtccccggccgacgacatgggctgagtgagttaaccgcagccggtaacagtgataccagtctcttcttgttcaaacacccagtgagactacgccaagaagacaaacgagaggaaatgcctagattgctgcaaccagcactttgctatggcaacgtaagagaaaaaaggcacaatggacttggccgcgtggcaggattggattttctgaatcgccattgcttggaaatccagaattctttttttctattttcctttataggcaggggagcaattgtctgtctccatacacctcacctgaataggcaatagactaggtcaggggcctagttcaaaggggattgtgcttggaaataccccggccatgattggctggaagttagccctaactcaggcagaaaacaatgtattaggaatatccagcaagcaaagagagtgtgcaaaaatatgtatatatacgcatattttgtgctattgccttgcgagatgcgacaaattctcttgatcttcacaaagaaataatcactcgtcatggctagcactatctacatggcaagtgagcatgtggtcgaacaactaaatcaaacccatgccgccaacgaaaagcatttcgattcaggggaggtcatgcgagacatgattattggtctggctgatggaatgacagtaccgtttgctctgacggctggtctatctagcctaggctcttccaagctggtcatcctcggcggtcttgctgaactcttcagtgggtcgatctcaatgggcttaggggcctatcttgctgctgtaactgatcgagaccattatgagaacgaggagaaacgagagcaaggagaaacgagagcgtgaagaggttgtctccaagccaaatgcagaaaaggaggaaatccatgggattctctccggttacgggatttctcgagaggcaagccagaatgttgtggattgcctgtctgaaaaccatgaaaattggatccgggtatgtcagcatcctagataagaatcaatggtgatattggctaacgtcgggacctagttcatgaggagccgaacgtatccagagcgtggatttcggcagcaacgatggggatctcttatttcatcggtatggatatctgctctgctattctttcctccttccacgacttatctgaggacctgactaacacgcgagtacttgtttctaggcggcctccttcccatgataccctacttcgttatgcacaaggttgtccacgcgttgttcgtatccatcgggatcacaattgtgattctggtcggcttcggcttcatgaaaaattatgtcgtgatcaagacgaaacaagcaggactgtacggagcggcacaggccttgttggttggcaccatcgccgctggaaccagttacgggattgtgtatggcatcgatcatagcaacctttatacatagcgtgttgcgcttccccgggtcaaacacagtttgttatctatgggggaaattgcatatggaactttataaatgagggggctactgaaaaaacgcatagttatagcccgcctggaagatttagacatttttgaaaatttggaaatcctatgtgacgaaagacagcatgaacatttctcaaagccactaaggctcttcgatctatcaccatctcaaataaaatatttcatgatttttgcaaagcccggttcttgcattctcacacaatctctatgatcacataccatgcctttcaatttacgttcaaacgctatatgctgatctcatataatgactcttctcatagtgagcaagatttgcacccaagaaccgaacgccctcacaccggtaaatcttcgaagacgctcagaaaccatcagtatattgtagtggtctccgctgagccagtcagacatgatgggcctgaaatctgcatgagatcaactgaaattgatgaaagcactgataaagactcgtggtttttcttccgtattccaattcgccctgaacagcaccgcaataagacctacaccgtgatcaccacagcgatagaattgttgatcaccacagatcacgatgcatattaccaagtgagcctgatatcgccatttcagaattgcaaagaattcgatgatatgtccaatgtcctatgaacaataccaaattttgacttccccattactgcagaacaggaaatttcccaggttctggtcccaaaactcagctccgtgctcatatagagtcttaagggccttttcaagttgagtctccaacgtcttctcgtggacatcagatttagagcgttgacgaagagtgattccatcaatttccgagaggataagcgccggacacacattgaaagaaccttgcccaaaaagagttggaattaaggtccctcgaagcattttcaatctatcgtatgcatgtatctcattccggaactcgtcatcccatccatccttcctttacttgacaatgactgattttagaagaccaagaccaggctggtcaagttacaagcggcataaagtcggacgacagtttttcagcaccgtaaccgaaatcacagttatgggcctgtcatctagatagaccgtctactgctgaatgagcttggtaaagtcttgcattaatgtctagaaatcggatctcacctgagaaggatgcacttcttgaacaatataatccatgacgtgaagggcgaatagtgcaggtgggagaatctaagactagaaaagttagaggaagggagtatgatatggcagagctagaggaagcaagggttccagggagggaagtcaaaaagcaaaaaaaaaaactagacctacatcaggctttgtattgagatatggtaactgtatggatatgtacatgggagacatggagctgatagagtagcatacacctgccattgatcatcttttcagcctcggaaaagatggatatctaactcaaatgtcgatttaaccaattcggttgagatgtttccctaaagcttgctatcttgttgtcagttatactcctcgctccctccatccatggatggtggatgttcgaggtaatgagtcagcaaaattccctcccgccgggcgcactaaccgcttgtggaatgtagcctcaattctttccccaagcctgagagatatagctgggaccatttaattgtggcgaaggcgaagaaaaacacagaatttcatcctaacagatttattgagctgagcgcactggagaaaaagtggcagtgttgcctttgatcgcatttgtcccagcccacccgagaggaaaccgaaaccaactgccagcaacatcaattggactcaaagctggcgcgaatgacattacgaccacaatattcacaagtctgatacaaaaccaatgagtatggatgatcagcgggggtctagaactgcccccttctacgcagtgccatcccgtcgcctcgtcagcgtcgagcaccctgccgtgatccgcaatgtcgacaaggcgatcgagaccttacaaggcgatgccggaataaaagcagtgaggaagcttctccttctggcagaatatagaacgcacactgatattatacagattctcaacccggccacagacggcacactagctaatctggtgttgcggccagaagatgccatggctcgatcggtgcagtcaacaagcatccaatcaaacaatgttttgctcaaaattactgtccccaagcggacaggacggaagcgcaagagaggctcgaacgagcctttcgcagacgcaccggagtcagaagcaactgacgcaccccggcgacggaccgctaaggatctcctgcgcagtctgagtgataacccttctaagtaccagattgagccggtcgggagggttgaactaacacatgtgtttcggggtaatttcactgctctgatttaatcatggcgagtatgctaatatctgatatcaggaatacctgatttcgtttactcgaccacggccagttcatttactaaccggttccgagaccaaattctcccttttgactgtgagtctgcttgccatgaaacccactcgatatgtgactaacaacccacagtcgacaagatgaagcaatttgacatcgacatggccaaaggcgccgccgagaatgcagatctgatcccgccaccatcatttagccacggagacgtccccttccactacgtgtaagagccaccccatcgaaagcaccgagctaagaccaccagtccactaactctccctcccagctatcggcaaaacccgacagtaaaacaagcaatcggcagctccggcaaactagaaacagtgaacacgcaaaccgccaacaaaatcctaacccacctagtcccctacgacatacccgaagtgccatccgagccgcgcgcggacatgctcccaataagcgcactagacgcaggcatgctccgcacaatcgcgacgctaaacgccctctacgaaaaacagcccgcctggacacgtcgcggactacgcaacaacctaacaaccgacgaagaccgtctgaacctccgccacgcaattccatacgtgggctacatcttccgatccgggccatggcgcgatgcgatcatcaagctcggcctcgacccacgcacctcaccagagtaccgacattaccaaacctttatgttccgacttctagcacgggaagcggaggttgcgcgagacggaggcggcggacgacgccacaatgtgccacgaccgagcgaccagcgcatgggcgaggacgaagccgccagcgggccatcgacgggccatattttcaccggcaagcagccgttcgcgcaagacggacggatctggatggtgggcgagatcaaggacgagcaactgcaggctgagctgtatcctcctgatgcggggcctgggttcctgcgcagcgagtgcgatattgtgaccgatggatggtttgggaatggcacgcttgcgaaggtgaagacggttatgcgacataagatccaggcgttgatggaagggcgggagccggttgatgaggattatacgaaaattatgcagctccctgcgcatgcgcggtctgaggctgatttcccgttgttcacgcttgatcccgaggttgcgacgcagaaggagattagtcttgctacggaggttcgggcggttatccggggttcgccggtttggaggaatttgtcagctaatgctgggttggttaggagggagattggggaggggagggggaaggtcaagggaaagcaggctgtgaaggggaagagtgctgagccggaaccggagccggaaccggagcctgagaaggtcgacgaggagagtgaaggtgaagaggaagaaattcagaggagggagatgctggctgctcaggttgcggatgctgctgcggcgagagatgccgatgaagctgatgatgacgacgaggcggacggtgacggtgatggggacgatagtgatgatatggatgaagacgacgacgagtaaagcggctactaaattactggatgattggctatgtctagaacaaatggtactttatgctcaatattgtaatcaaaataatcattttattcgttgttaaaaccgtaggcagactcggagtatattgtgaagcatcagacacaacatagagagtaactcatcaattaggtaggataaagaaagtcaacccgagtggtcgtaatagtgaagcaaaacaaatgcataattcaagccttataccaaaacacccgatacactgaacaccagtgtccaaaaagcgacgaacaccatgacccttcgtatagttatacggcttgagggttttgagtttttgaaatggtacttagtattatgttactttgccagatcgattcgtaagaaaagagtgcatgttaagatctgagtgtacatcgagtggaatatatagaaacatcaaaccaaccggccttgatatcttggtccacttcgtcggtaaattagtagatattaattcttctctacttattcacaatcatacgagcggctgacgacacaaaaaataacgattctaaattcgtgagtggctgcttggtccgttctatgaccaatggcagccagtatgtagccgccagtcccccttcgttcgtgctcacgtgcatatttatcattgcgcctgctgcagctacgttagctggaaaccaagccagaggctctcaggccgagaataggtggtttcatctcaaattatttctcagtcagagtggatctttgcccttgagatgagccatcaaccgctacaattgtgtatttcctccccttctgtcttgagcacgcccaagaggagtaagcttgtcatgacccattgtattaaacatacgatctattcagtggcagatgaggtccatattggattcctaggatgtatgaagacagattatacacctaatgtactcaaaattccgatccatgcttactgaccccaaaaagtaccggtggagcgatgcctatattttattacaattctatgagagtagacatgaaaatctggcagatcaaggccaagaaatttataaagatctcatgctaacgagaacaaaagaaactcagtaaaaacttgaagccatagttctgcagggctgtaccttgaagaaactcggagcggaacaaccaccaccgatatgactgccaaatgcggactagtctttctttcggggtctctgcgatagcccgcgtcctctgttctgctctcgtgaatatcgcgccgcatacaatccccaactttctccccatctccctcagcctctcctcccctgcggggtaattccattcactcattcgctgtccggacttaattcatttcaatggattaggcagttttgttttcccgaaagagtaaatgacttgatggtttctttcgttttaagttctacagtctccgatcttttcgcatatcgaccgagtccacagagcttccgtgacaccacaacacaacatatgagagctcaattcccccccgggaagactgcgcacactccgctctcctcagccggcctcttggcccggccgtcattgctgtttctttccatttagtcgccagcctgtgagaagggtcagatcaaagcgatggagcgaaacatagatatctacgccagcaagctcggcgacgaaaagctaggtatgttgatgaaatctgcacaactagaactgttgtccccttcctgtgctaactaacccgtcgtctcaatagacgtcaaagtccgagccaatgttgctaccgaattacgagacagcattgagcccctatgttcgggcgcaagctatcccatattcttagcgaagctatggccggtattcaaaactattttgaagggggacccggtcttcttcagcatgtcttacgaccaggtgagattattggcacacgcttgcccctagtgaatgttgcgcataacgagctaacaaccttggtcatctattagaaattacgaaattgtatcctcgaaacattacaccgattaccgatgggatccccggacgtggagccgtacgctgtcgatatggtcgatctattgatggaacttgcgcggatcgaaaacgaagacaatgccgtgctatgcatgaagacaatcatggatttggagaggaatcaggccaaagccaccgcacaccgggtgcaggctttcttggagcttatccaggaaatgttccagaccatggagcaggtggttcgggatactttcgacactcctaaccaggccacaccgtcgggaatgccatcgacgcccaatgcaacagcacagaacttccagtctccgcgacccagctcgcctgctacctcagtatcagatctgggacccgatcagcagtcgagcaatgttctcctcaagggcatgcaatctttcaaggtcctcgcagagtgcccgattattgtcgtttcgatcttccagacacaccgcgcatcggtgccggccaacgtcaagctgtttgtgccgcttatcaaaacgatcttactgctccaggcgaagccacaggaaaaggcccacgccgaagcagcagcccaaggcacaatatttacgggtgtgtgcaaggaaatcaaaaatcgcgctgcatttggggagttcatcacggctcaggtgaaaacgatgagcttcttggcatatcttttgcgtctttatgcccatcagttacaggactttcttccaacgcttccttctgtcgtcgtccgtctccttcaagattgcccgcgagagaagtccggtgcgaggaaggagttgttggtagctattcgtcacatcatcaactttaactatcgtaagatcttcctcgagaagattgatgagcttttagacgagcgcactcttatcggagatggccttactgtctatgagaccatgagaccattggcttacagcatgttggccgatttaatacaccatgttcgtgagcatctgagtcgcgaccagatacggcgaacggttgaagtctacactaaaaacctccacgacgatttccctggcaccagcttccaaacgatgagtgcaaagcttcttttgaacatggcagagaacatctccagactagaggacaagcgtgaggcgcggtatttcctaattatgattttagatgctattggtgacaagttcgcatcgatgaaccaccagttcaaaaacgctgtcaaagtttcaagggcgtacaaagttttccgacaagagaccgagccttgcgccgagaactaccttgctgagaaggaccagccaccggactgggatgagattgatattttctcggcttctcctatcaagacatctagtccacgcgatcgtggaggtgacccagtttcggacaacatcttcctcttccgaaacctgatcaatgggttgaaaaatatcttccggcaattgaaaaattgcaacccagacgatgttcagattgacccgaacagcgttcccattaactggtcagaagtttcgtacggttacaatgcagaggaagttagtgtgatcaagaagcttttccacgaaggagctcgtgtgttccgctactatggggtggatcagtctccccctgagatgaactacgcatctccgtttgacttccttgctagccagtacactgccccaatgtcgcgcgaagaaaaggagcttcttgaaagtttcggcactgtttttcactgcattgataccgcgaccttccacgaagtcttccattccgagatcccgtacttacacgagctcatgtttgaacatggggctctccttcacttgccccagttcttcctggctagcgaggccacttctcccgcattctctggcatggtgctgcagtatctcatggaacgcatcgatgaggttggaacttcagacatgacgaaggcaaagatacttctgaggatgtttaagctttccttcatggccgtgaccttgttctccgtgcagaatgagcaggtcctccacccgcatgtgacgaaaatcgtaaccaagtgcattgagctttcagtcacagccgaggaacctatgaactacttccttcttctgaggtctctctttcgaagcattggtggaggacgattcgagctcctgtacaaagagatcctcccacttctagaaatgcttcttgaaacgttcaacaacctgttacttgctgcccggaagcctcaagaacgggatctgtacgtggaactcaccctcaccgttcctgcgcgactcagccacctcctccctcatctcagctatttaatgcgcccaatcgtggtcgccttgcgtgccgactctgatcttgttggtcagggtttgcgcactcttgaactctgcgtggacaacctcacggcagactaccttgatccgatcatgggcccaataatggacgagctgatgactgcactctgggatcacctgcgcccatctccttacaaccacttccacgcacacaccactatgcgcatcctgggaaaacttggcgggcggaatcggaagttcctcaaccacccgccagaattgtcgttccagcagtattctgatgataacccaagcttcgatatcaggctgatcggtcccaacgagaagcggccttttcctgtagatatcggtattgatctcgctgcggggaaactcatggaggttcctaagacagactccgggaaagcttcagacatttactacaagcagcaggcctaccgcatgctcagctcccatctcaagctccaaatcggttacgacaacatccccgaagacttgacaatcttgatcagactccatgccaatgatctgttcgaaaataagacaggtgctatggcagatattcttgacaagtcggaaagatcggcctctattccaaagaagattgcgcaggaagcaacagtaaagaaacttatcaaggcttgcatctttgccaccactatccccgagctcgaaccagccgcttcagcatttgtggcggatgtgtgcaagcacttcgctcttgtagaggtcggccgtgctctggctcaaatccgacacagtcgcaaagcctttgacgtcgcaaacggggaaggccctgtgtacctcgactctaggattctggctgaagctttagttgagtgtttatcatccgatgaggtccacgtccgagaagcagctgagcaggcaatggtggttgtgaaggatgccgcaggcgtcatcttcggatcgcccgagaaagcagccaagctcccattcttcgtgcatctgggccgcgtcttctgccacagctgctacagtgaagagtggttcaccaaggccggtggcagtctgggaattagcctgctctcaaccaagctggacttgggagatacatggctttatgagcgacatgtcgagttttgtcgtgctttgatgtatgttgtcaaggacacacctgcggatctccctgctgctacgaggcttcagtcacaagaaacaatgactttgatgctgcgaagatgcggcaaactcatccccaaagaagatttgaaaaacgagaagagccgcttgtatgctctgtgtggcttgttcgtgtttgaactcgcacacatgaataaacatgtccgggagactgctcgtcgttgcttcaccacattgaaggaggtccttggatgtgaggtgcatgagcttattttccccgttagagatcgtctcttacagtcgatcttcaacaaacctttgcgtgctctgcctttcccaacacagatcggtttcattgatgccatcacgtactgcctcggccttcacaacgacatcgtcaccttcaacgaaccgctgaaccgcttgatgctggaatctctcgccctcgctgatgccgatgatgaatctctagcatctaagccgaacgaattcaagactgcagatatgattgtgaacctgcgtgttgcttgtcttcgccttctatctatggcaatgagcttctccgagtttgccaataccccgcagaacacgagcagggctcggataatttctgttttcttcaagtcactatactcaaagtcacaagaggtgattgaagccgcaaacgcgggtctccgtgatgttctcacccagaccaacaagcttcctaaggatctgttgcagaatggactgcgccctatcctcatgaacctccaggatcccaagcgcctcagtgttgctggtttggatggtcttgctcgtcttttgacactcctgactaactatttcaaagtcgaaatcggcgcgcgtctgcttgaccatatgaaagtcatcgcggatgacgccgtattgcagaaggtgtctttcagcctagttgagcaaaacccagcgatgaagatagtggctgccatcttcaatattttccatctccttccaccggccgccacttccttcatggaacatcttgtcaacaaggtcttagatctcgaactgaagcttagaagaacgtcgcacagtccattccgcaagccgcttgtgaagtatctcaatcgctaccccaaagagagtctcgcattcttctttgcgcgcttcaaggatgagcggtttggacgattcttcggacaaatcttggcggatcccgagagtgaaggactgcgaaacgcgatcgtcgctgacacggatggcttttccgctgccgcctttggtcaggatactggtgatggcaagaacactgctgctatcaacggagtctatgtcgcacattctctttgttcctacagttcaaccaagcgctggttggtctcacatgcagagatgagaaacaagctcctgacttccggtagagatctggagaggaagcttcgtggtgatagtctgcctgctgatgagcgacttcgagtggagcaagccgaagaccaattgatggatatctttaccatgtacttggcagaggccacccacgatttggacttcctgtttgaagtgattgacgggctctccgccgatgagttgaaacgcacgcttgcgcttcctaagttcatctataagagcatcatcaccaatgagtccatcgattaccggcgttctgttattatgcgctgtctcgacctctacggccagaagagctgccctcagaagaccaagacttatgcctttcgccacctggtcaacccgatctttgccatggatgtccagatcacttggaatagccctccgaacacacctaagttgatggataagagcatgaccgagtctatccagagtcgtttgtggaagccccagctggctgatctgagcgaggagtccaatcaagctggcgtggaccactcacgtatggagttgctccagctgtctgctttgttgatcaaatatcattcacagacggtgcaagattctcgcaaagatatcatcaagtttgcctggaactacatccgactcgaggatatcatcaataagtacggtgcctatgttctgatcagttacttcattgcacactacgagactccattcaagattgtaatccaagtctatgtcgcattgctcagggctcatcagaatgaaggcagagcccttgttacgcaggctcttgatgtcttggctcctgtcctccccacgcgaacagccaacagctctggagcagaggcacggtaccccctgtgggctaaatggccacgtcgtattctagccgaggaaacagccaatctccaacaggttatgagtatcttccaattcttggttcggcaacctgatcttttctacgagtcaagggagcactttgtgcccctcattgtcccatccctagtcaagattacaggtccaccaaacacctcgaacgacagcaagaaactcgcattgaacttgatcagcttgatttggcactgggaagagaaacggacccagaatgccgaggctagccacttggccaatgggacatccgagtctccagttgccaggaaacgcaagctggacgaacctcaagagccatcgccgtcccccgctcttggtcctcccagtagccgtgaacgatcggactacacagtacccaccgatttgcgcgcgtcattgatcaagtacctcatcacattcatcaccaccatacccgaacgcttcttggttccagctgcccagattcgcctaatgcccacaacaaaacagcaaaaccctgtgcccaccggtggaatgatcaacaaagctataaacttacttcgcagcctcctctctcctgagtactggggagatctagacattgatctttaccaaaaggcgactgaaccaatcctagtgggtgacaaaggggacaaagccgaggacaaaatcacctacactgtcaatacgctgcaggttattagggtgctcatagcagctaaacccaatgagtggattgctgctcgtcttcctactatccagaagcttctcgaaaagcccttgaagtcggacaacccagagattcaggattgtctacatggactagaagatgacatggatgtcttgcacaagctgccgcctcctgtccgtcgtgttctggaggctattccagatgaacagcctgatgacgaggatgcgatggatacggagggaacgccttcggagttcggttcatacttgtctgccatcgccactgaaacactttctgccagcaactacgtgtcaagtctgaacatcttgtggacgctctccaaggtcaagcccgccgaaatcgatgcccacattcccgcggtgatgaaggctttctctacaaagctcgcgaaggaacatgttgctgcttcaactcagaatggagcccagctggcaaacggaaccaagcccaccgaaggagctccaaccatagatcaacaagagtttgagattggagttgatctcatcctcaagactattgagctcatatctgttagaatgtctcatcttggtgaccaacgtcgtccattcttgagcgttctagcacagattgtggagcggtcacaaaatatcgagctgtgcagcaagattttgggcatggcagagtcgtggatcttccattcaaccgagtcctggcccaccctgaaggagaagacagctgtcttgcataagatgctgcttttcgaatctcgacctgatcagacaatgctgaaaaagttccttgatcttgtcattcgaatttacgaagattcaaaaatcactcggactgagttgacagtccgtttggagcatgctttcctgattggcacaagagcccaagacgtggaaatgcggaaccgcttcatgcaaatcttcgatcggagtttgactcgacttgccagttcgcgtctcagctatgtcctcacatgtcagaactgggatactcttgctgactccttctggctagcgcaagcatcacatttattgcttggttgtgtggacatgacaacgactgcccgcttgcaccctgaggacttcaccctgttccccgtatcattcctctttggcagcggcgataaagacccgaggaaagtcgatatcacggtcgatagccagctggagaccttcgtcgcagaccggagacgattcatgtcggacattggcgatgtcagagttcgcgatctggtcgagcctttatgtcagcttcaacacaccgattccaatgttgcctaccagctgtggactaccatattccctctcttctggtctaccctgtctaataaagactgcattgacttggagaaggatatggttacattgctcactcgtgagtaccaccacagacaactggacaagcggcccaatgttgtgcaagcccttctggagggtaccgtgcgtgctagtaatcctcggttcaaaatccccccccatgttatcaaatatctcagccgaacgtacgatgcatggtacactgctgcgatctaccttgaacaaagtgccattaatcccatcattgacacacctactgtgcgcgaaagcaacctggatgcgctcgttgaggtgtacgcaggcctccaagaggatgacttcttttacggaacctggcgccgtcgttgcaaatttgttgaaaccaatgctgcgctttcgtatgaacaacaaggaatgtgggacaaggctcaacaactctatgagaatgcccaaatcaaggcccgctctggtgccatgccattctcacagggcgaatactttgtctgggaggatcattggttgatctgcgcccagaagctccagcagtgggagattctcagcgacttcgccaagcatgagaacctgaacgatcttttgttggaggctgcttggaggaacattgaaaattggcagagcgagggtaaccgggagcagcttgagtcattgatcaagtctgtgtccgatgctccaactcctaggcgcaccttcttccaggccttcatggcccttctccaatatcacaccaagaaggacaatatccaggacttcaacagcgtttgcgacgagtctatccagctctccattcgcaagtggctgcaattgccgaagcgcatcaccaacgcccatattcccatcttgcagcatttccaacttcttgttgagctgcacgatgccagccacatctgtagcagcttggctcagacaaatgaaagaaacttggataccaagtctgccgagctcaagcttcttcttggaacctggagagaccgcttgcccaatctctgggatgacatcaacacatggcaagatctcgtcacctggcgtcaacacatcttccagctcatcaacggcacctacctcagtcttttgcccccacagacgaataatgtggccagtaactcttacgcctaccgtggataccatgaaacagcctggatcatcaaccgattcgctcatgtagctcgaaagcaccagatgccagaggtctgcatcaaccaactcagccgtatctatacccttccgaacatcgaaatccaagaggccttcctcaagcttcgggagcaagcgaagtgtcactaccagaatccgaaggagctcaacagcgggctagatgtgattaataatactaatctgaactacttcgggccacagcagaaggctgaattctacacactcaagggcatgttcctcgccaagcttgatcatgtcaatgaggccaatgaggcgtttggagttgctctctactatgatctccgccttgctaaggcgtggtctgaatggggacaatatagtgaccagcggttcaaggctgacccgactgactacgagctggctagcaatgctgttagttgctacctggaggcggctggcctttacaagagcgcgaaatcccggaaactgcttagcagaatcctctggcttcttagtttggacaacgacgaaggaaagatcgcaagtgctttcgaaaacttcaagggagataccccggtgtggtactggatcactttcattcctcaactcctcactagcttgtcccatcgggaggcgcgcctctgcaaggctgtcctagtcaaaattgccaagttgtatccacaggccctcttcttcttgcttcgcacgaacagagaggacatgctgagcatcaagaaacagcatgatcagaagcaagagaagttgaaccgggccagacagcagcagcaaggatcctcgccaagtaccaagccaaatcctgttgctggtgccgatagttctcctgctcaaaaagcccaggctgcagctgcatcgaccaatccctccccgtcagttccgcctgcgaattcacctgctacgcagaatttagcccaagcacaaatccagtctcctgcgcagccacaaaaccctatgcaggcatccccacatgctggccaacctccgggccaagcgcaccaaactcatctacaagtgccaggtcagactggaacaccgcagcagaatcaggttgcacttgcagacggcgagaaggaacctctgaagaaaccctgggagtactcggacgaaatcatgtctggactcaagacggccttccccttgcttgctctgtctatggagacaatggttgaccagatccacaagaacttcaagtgtcccccagacgaagatgcataccgactcatagttgctctcttgaacgacggactggcctacgtgggtcgcatgcctggatcttatgcccaagactttaagctgcctgccgcaaccgaagccaacatcacccgattcgcggagacaattctcccagctcacattcgcaagtccttcgaggcggactttgtgaccaagaagccaaccatgaacgagtacatccacaagctgcggcgctggcgtgacaagttcgaggaaaagctcgaccggagatcacagcacacattcctcgaaaactcttcacctcatctgagtgagttccgcttcctcaagtttgatgaagtcgaggttcctggccaatatctactccacaaggataagaaccaagactttgtccgcatcgaccgcttccttccagatgtggacctcatccgaggcattggtgtctgtcatcgccgcttgaagattcgcggacacgatggcagcatgcaagcatttgccgtccagcatccggctgcccgtcactgcaggcgtgaagaacgcattcttcaactattccgaattttcaatggtcttcttgcaaaacgcaaggagagtcgtcgccgcaatttgtacttccatctgccgttaatggttcctctagcaccacacattcggctggtgcgtgacgattcctcgtatatctccatgcagggaatttatgaggattactgccgccgcaagggcattaacaaggatgacccggtgcttttcacaatggacaagatgcgatcgttggcagagaccaagcagaacgtaagtgtgccgtacacccttctcatatcaaaagctaacaactcccagcgcacgcccgaccagcaacaggttcttcggacagaaatcctgaccgcgattcaagacaaatgggtcccgagtactgtcgtgttggaatactgccagcagacataccccaacttcgcagacttctggctcttccgtcgtcaatttgcctaccagtacgcggcgattgctttcatgacctacgtcatgcacatcggcaacagatacccgaacaaaatcttgatttctcgttcaacaggcgatatctggggtgcagagttgatcccgactatcaacccggctaaggcgttcttctacaaccccgagcaagtccccttccggttcacacccaacattcagaccctcctgggtccgattgcaacggagggtgtgttcgcctgtgcgatgatggcaatcgcccgctgcctgacggagccacgacacgagctggagcaacagctcagcgtctttgtgcgcgacgaaatgatgttctgggctacagctcatcaccgaggtgtcttgccccctggacaactccgcgatctggtctacaacaacagtgaaatcatcgtcaaccgtgctgtcagtcttgccagtccaccggagggtaacttgcctgccaatcagaccaccatcgatctgatctcgaaggcagtcaacccccagcatctagcgtcatgcgatgcattgtggatgccgtatctgtgagcgatgcttgtcggtttgcgtgtttttgtcctgtcaattggcgcggggaactatggctattgtactttctgaagagggggctttgtctgggtttgtttttttctgagcgtgggcgctaggtgcgcagatttacttcacgttactatgattgtgataccgattttttttttgttctaataccttctacgatgtcttgatacttcggaatgttagctctgatagttcttaatggatcgatttaattcgatttgactgttatctgccaatttcatcctgtaacctgtaatctgtaaccaacgcatacgatatatgccatccgggacttaattctcactgatcaatattgcgaagcagaagttcggcgatccacactcacgtttggagtagttatggaattaggtatatgattcataagcaaattcgcgcccggataggctttgttggttgatcttgtcttctctgtgcagtctgttgaacatgtcgtcgacgattttgcggtaagatgggtaacagcttctcccagccgtccaccaaggctatctccatccatcaatcggtttccagatatattaaccagtgcggagttcttattcgagatctcctgccattgaatacattgacaattaggcaattcgtttgccgttgctttgcgccgtagatagtgactccattcggcaggacgttctctcgttgagcgtgtccgaggccattgtataaccgatttagtcattcgctcatgatgtattttccccatggtattcgctgctgtccttttggccatgacattcgccagaacacttggggctcaggtgcagctcgacatgcacatcgggcctctgaagggtgaagtgtccactgattgcttccaattgagggggaggtgagatctgatgctcaccatgctgtgctagtatcaaagaaacgtcgtatattgccgaggatacaggtctcacgagctgaggtatcaccgacaatagaaggggtatccaccgacagattaccagacctataaactcaaggtcacggactagatccgagcacggtgacgggccacggcaggacatactagaagaagatctgtcatttctttagatgcgagttaaagggaaaatgcagtagcaaacagttccccgggaggagagctgtgagagtgataaatcatgactactccgtacttgtgccctacgttgactggtccaatcgggactatttgtaactataaagaagaccattaagacgttatcataattcatttcattgattaaagaaggacctttgtgcaacgtggggtcaccacgacacggtcgctatctccgggttgttcgttgaggctgaaagatcatttcttagtcaaggacgcgtccttgtccttcttagggcgggcaaatttcgcccagtaccctccaagctcacttttacgcgccatggccgcctcagcttcacggaattcctgctccgctttagcagccatcgcttcagccttcttgcgtctgaactcctggcgcaagttctctctgtcctcggcttcctctctcgccgctcgaagagcctcctcgtcgatcttttcctgaacagtagcgacggcagcctcgtcaccacgggcttcggtgcgctcgatgcgggcattgcgggttcggatttcgtcgagtgcgtcggcaatttgcatctcgcgcttggagtcaagcatcttgtcttcgagtgcagccatcttgtcacgttccagctgctcctccttggcgccgtgttccttctcgagtcggttgagggtctgcgcctcggtctcgtcgttgtacttctcgtcctcgtcgtcacgccaaactgcgaagttgcgctttgcgccgcgctcacacttgtagtcgttgtctaataattgatgttaggttgtatatagcgaagtggtggcaggatggtctcaaacttactcttggggtcggtacggaaagtgatctcaccgctgcagcgagtgcaacggatgtagaaccggaagattggaatcgacaggtatctttcatcgagagtctccttgcgcgcattgaacttgcgacccttgggaatgtactcgccgcagtgagtgcatttcatcgagtagggtgtcatcaggcggacaggggacagcttggatgatttgccatccttgcgagagcgcttcgaagagccttcgatggccgaaggatcgaaatccggggggtaatactttgaaagaacctttcgctcagccatgatggattttgatggcgatgggaagtatgggaaagaaacaaaccttcgcaagagaagctctggcattatcggggggcatcgttatctccacgtgatcaatcagctcggttatcgccgcttaagtccgatgcttcagatggcgataagggtgaaagtcacgtgtggatgacgataacagaaatcccccgaactggggctacgcgctccccagtcaacggtacccgccaacagattttgaacttaggtactttttgtatgagtatacaatacaaaaggaacaaagacataacttatcacgtccatttccccaaccctaaccagctaaaacatgaataaccagtcctaatatataaaataatttcgattagatccttctgatcgtatgattgattctatacaattggtatagaagtacctatgagaagcatatttacgcttggtatgattctacccatagtagatgcatcacgtgacctctgtataatagaagacaaaaactgctatgatactggtctggggaggtcttccagttaccatcattttgagacttttaatagtaattcagcccctttcttaacccaatacatattctctaggcgaacactctacctacattattgtacatacatgtacggagtagttaaccttccgccatcacagacacgcacggaccactgtttggttcaaaatagggcaaggacccgctcatgtgaaagttgcctgcgactcgcattgcttgggcatatctccgggttctaacagaaatatccatgtctgttctctctttgaatccattctttaacacatcttctctgtcaatatggaaaggttcctgcgctcctggcgacaggacgcgttgaaccgtggccagcatgattccgcaatctacattggggacaaagtcctggcacttactagtaagggctacaagcactacgaatatactgatatactgacttgcttgtgaaggcagtgactccgatgcgttttggctagcccaggtacacttttccaataacaacttcacacgcgccctggccctcctctcccgcaaagatctcgtttctcgaagcactgcctgccgctaccttgctgcgcactgctacataaaacagaatcaattcgaacaagccctctccattctcggtgaacacaaccccacagacctgatccgcaataaccacacccggcgcaaaatccaacaccaaagccatgttacactgcgcaatgggaagagtgcgacaccgcgcagtgatcgagccgaggagagagaacgcgaagatgccaacaatgtacggtttgaagccgccatgtgttatttacgggggctctgcttcgctaagcagaatgcatttgatcgtgcccgagattgctacaaggatgccgtgcggattgacgtgcagtgttttgaagcatttgatcagctcatgaagaactcgctcatgtctcccacggaagaattggaattccttgaatcattggactttgattccgtctcatcccccgatccgatgatggcacaagaagccgcccatttcacgaagatgctctacacaacccggctatcaaaatactcctcccccaccatattatccgatgccaccgaaaccctatccacacattataatcttgcagagaatcccgacattctattgtcccgcgccgaagctctgtatacgcaatgtcggtttgcagaagctctagaactgacatcttctatcctctccgcatctcagtcaaccgacctgtccacaaatcccagcattccgacacagaacaaccttggccatgctccagctatttatccgcttcacttagcttgcctttacgagaccggtgccacgaatgccctattcttgctctctcacatgctcgcggatcattcgcccgaagagccttacacatacttggcaatcggagtgtactacctttcagtctcaaaggtggctgaggcgcggcgcttcttttcgaaggcgtcactgctagatccgcattcggcgccagcttggattggattcgcgcacacctttgccgcagagggtgaacacgaccaagctatcgcagcatatagcactgctgctcgacttttccagggcagccacctcccccaactgttcctaggaatgcagcatctcgctctcaataatatgtctctggcgcacgagtatctatgtgctgctcacgctatgtcgactggagctgctcccggctccgtgccttccctcacgcctcatccctcagggattgtctccgcggttggtggggatccactggttctcaacgagcttggagtggtattttaccatcagaatcatcttagcggcgcggtcgaattatttgggcaagccctggcgctagctacttctctccactgcgaacccagtgcctgggtagctacacgtgcgaatttaggtcatgcccttcgtcgcatgggccgtctgtccgagtcccttcgtgaattcgatgaatgtcttcgcgtgggcgcaggaggcagcagcatgggctactcgccttttttgggtggtggtacgggtggctcagcggcgatcgctaccgcatctggggttgggggctacgaagatcgcgggctgaccggttctcttcatacgtctcgtggccttgtattactggagttgggacgaaccacggacgcggtgactgccttgcatgaggctgtacgtgtacttggagcgagtggtggcgggggtgccgccgnnnnnnnnnnnnnnnnnnnnnnnnnnnnnnnnnnnnnnnnnnnnnnnnnnnnnnnnnnnnnnnnnnnnnnnnnnnnnnnnnnnnnnnnnnnnnnnnnnnnnnggggggggggggggggcggcgccgcggggggtgcaggcgtggctggtacattactttcacgtgcacttgagctctgggcattggaggggcgacaaagggaccatacggcttttgaggagagtatgcgagaagccagcgcagcctcctccaagcgccggggatctacccggtcccgtgaacataaagggaaagagcgagttgccccggaagagatgtctcgacggcgtgggcgtcaggagccctttgtggaaggatggacggaggaggtggcccatgtcgccacagccacagccccggccgaagatgaaaaggttgagatggatctcgacgacgaagctgacggccttttgcgccgagctctcgaccgtgtacgacacagccgacaacgtcgaccagcagtaccttctaccccggatatggatgccaatgagccggctgctccatccagtggccgcagtcgggggacacgacatgggcggagtcactctagacaatgacggggcttttgaatcctcctcaggtgaaattttgcgttatgttccatgcattgcagcgggcgtttctgccagggaaagttggctaggggttggggcaattgctttttttatggatctcatactagacgatcaaacagatattgttagggacattccttatacttgtatctagtttgatggaggaactagaaacggtagttcaaacagagccctcttcacactttagcctttgaagctattttttatacggcgtagcgtcccggctattatccactagaggcaagtactagtatagatcaacagaacagagtatgttgttatgttggagtatacgactatcgcccccaaataaaatcaacaatgaaggaaaaggctcggtgagacggtgacttggtgtcttggcaatttctcttctctttcttctctttgactgtctgtctcttctatgcatatcggaggattagccccgtccaaccaatctcattatatcgatccaatcaaaaaccccaataacgcagttaaaacccaaaaacaggtgatgacgccgctgcccccactgggtgtcgggctgaggctcgccaatccgcccgtacggggggcgttttagcggcgatcgtccgtagttgcgcatcactgccatttctgggggcatgtttcagggtttgccttgatcggcccccttctcttgtttcttgccttgaacactctttagacaattcctctgcataccttctgacacctccagatctctccagatccctccagacaaattccaagacacttccagatcatgccgtgccagtctggatctttaccatgacagcctcatttcctattcgcccacgacgcggcttgtcccttctgtgcgtcataaccgcttttagcttcagcgccatcatcgtcatttggtttggcatgaactccgaccgagaatacattcaccctgttctcacccagttaatccccgccggacactgcgcctgcgaatcctctactaccttccagtgctcgacatgcctcacctgcccagaacccggtctacaaacagaccggtcccccgtttggtcctttgaatacgcccgcgacggtcataatgagactctcaacaagagccagtgcaaagctgccttccccgggttattcgaggatgttgcgcgcggtggcaaattctggtcttcgcatggtcgcttgtcgtcggtagaactaggcgccatcaagatcgaacatggtatggcgcgtgcatttatctctaatggccaattatacgtggtcacggcgcggtccaagggggaggatcaccgacggaaaattctggggacattgagctcaatccatcgtgcgctggccgccgacccagaaagagcttctagacgcgactttgaattcgttttctcggtggaagataaggtcgacgatgtgactaactcggaatggccggtttgggtcttttcgcgcactccgactgaggaaggggtttggctcatgccggattttagcttctgggcctgggataaccgcgacaactacatggggccgtatgaccaagttgtggaacgaatcaaacgaagggatattccttggtcagagaaaacgcctcaattggtttggcggggcaagcccagttttgctccaaaattgcgacgcgcgttgatggaggccgctagggacaaatcgtggggcgatgtcaagcaggttgattggaacacgggttccaatgtccttaagatggaagatcattgccattatatgtttattgcgcatgtcgaaggtgagtctaatttctcttctctcccgcgactcgaggacgccagctgacgacgtgcgctattcaggtcggtcgtactcggcttcattaaaataccgacaggcctgcaattcggtcattgtcgcacacaaactccagttcatccaacatcaccactatctgttggtagcagatggtcccaatcaaaactatgtcgaggtcgagcgcgatttcagcgacttagccgaaaagatggaacccctggtcaacgacaccgaagccgccaagcgcatcgctaataacagtgtgacgaccttccgtgagcgatatctgaccccggcggctgaggcttgctactggcgatcactgttcgatggctacgccggggtgtggaacgggactgtcgaacagtggtccgatcgtaaggaccgcgaacgagggcttcgatacgaatcatttgtgcttctggagagcgtgaagatgtacgaattcgaagctgctatcactgaacaatggcaggctattttgtaaggataggcaaacagaatacgggagactacatacaacccacaataatacgttaatacctaattgcgagccagaatagatattgtctacaacatagtctttgatttaggggtccccgctgacttgaccagcaccatattttattttgccggcagtatagtttgtaatctaagtatttttacatctgaatacgtcgacagcacagcaacttcacgattttatatattagttttgtacggtgactgtgcttggctggttagtaactaaacacaggcggtgagctaggcggtcaaaattaaagacgtagtccggggccgagaacagccccactcgtttccccgagcttcgcattgtttcaacgacagggtacgttgaactcttacatttcaagatttgttcgtacttggacatcaattcatgcttctttgattttatagagtgcttcgttgcgtcattctagtcgatcaccccaccgagcacccatcaagcagtccagtctacttctgtttattcacgaagaccccaacttggttaaaataacccgacaacccagcggtgctagaatcccaccctgtacaaatcagcatacatcatcaagacctagcagaaaaacacttactggcgtcatcttcaaccgatacgcaggatcaacaacccagctaacccttcccagcaaaacaaacaacaaaatcttcacctgcaacaatgcaaacccctgcccaaggcacttccgcttatgcgcattaaacggaatatacgttcctcgaactgtctccctccgaaaccgcccctgcatctcctcagcactctccccccacctctccgcccggaattcgcgcgcatcctcaccccatatatccgggttactttgcaccgcccacgcattccaccccacaaatgtacccttcgcaatgggaagttccccacccagcagtgccggccgcaatgcgacacggttaatgagctgacagacaggcgggaagagacgaagtagctccagcaccacggccgtcaggtatggcagaccgtttataatttcctgggatggattcgggtgagttttggccgtatcaagaatctcctcccgtagccgatcctgtatatcgactcgagtgcccagctgccagaacatcgaggttaccagttgctgggcgttttcatgtgcggttaggaatgttatcttgaggttgtcgcggaattgtttctcggttatgcggcctgatgtgtatgcttcgcccagcatgtgtgagaccatgtctttggattgggtgggattgatttgcgtgcgcttatgaagcattgccattatcattgtgtacaggcagttgtcgaattcgcgcattgtattgtaggcacttttgcgtgacgggaatagccaggggaagtgatcgaggtccgggaagctgaagtacattggtttgaagagggttgctttgataatagattggagggcttcgattcgaacggcgccgtttggttggcctagactctggtgtgggttagtcttctgtcttcagttttcagctattagagattgaatgttcgtttcagggaggccatggcaaggttgacttgataccttcaaatccaagtccaggaaattctcgctcatcacatccacagcccatttctgtacgtctgccataatcaagattcctctattcgctccaacctccttctgcagatcgattagaacatcgaccagcttcctcgactgcttcagcaaggacgttgtctcaaaaaccttcttctgcaacccggccttcataataccagtataaaccttccaattctcaccatgggcattgatgatgttatcaccaacaagcgtcgcaataacagcatgcggaatcttaatctggctcccgactttcgcatatatatgttcattgcggaacatatcagtcaaccaatccggtcgtgaaacgagcacactccatcttccagcgaaccagactaacacggcgccgtgtttctccagtggagccctgaaccatctttcgtagatctcgtcttggcccattgaggaccataaccccaggattgagacgtagattggaattctgggcagatttggcagtgttcgagagacacggaggtaccaggttaggaagaggagaggtgggaggaggatgattaggagtatggagagaagtatggaggataaggctaaggccatgttgggcgtaggcttgatagatttggtagaaacgagaaccaaagagaataaaacgggggtctgctactctattgctggtactatacagcgaattaggcgtctacttggtccgccgcaccctaatgcattaggtgtcagcagaagtcaacacgcctgcgctgaggtcgtactgtccaccgtacctttttttggccatctttctgctggattctactgctaggtggctttggtgtgttcaatttgcattttggtgattgtgcgctcaacgtttctgtgtggtgaggaatatagtcccccaaatggtactcacaaacggaggttacaggatgtctagcttggcaacttgtggatatagtaatatggcctagtggtcgctttgactgggtcactcctcgactcattttctcatgaccgtcaggtttccgtcggggtgacgcttgatctctgcaggttcaccttcgcgcgagatttgttccataactcatgacggcattcaattatattctcttattgaatgcagactatgtgatgcttaggaagagactcagcctagttgaattggtacagaagattgctatagactagcttgctggtattgtatctattgggttgaagaggaatatgtagacagccacacatgtaccaaagctcttgtccaagatctgaaataggatttgcctaagctcctgctaaaattgtagcagatagcgagaatccgtaaaatacagtggctatcatagcaatagcattcaaatggatagccattacatgatttcgcgcgaaggtacggttagcccgaagcaccttcgacccatcggagtcagcatcggtgctctcgcttcctgcatggtgaatttatgttagtcgtataatcaagtttggcgcttcacgaagaacctaccctgtagcgccctcctgaccaacatcgcagtggtcgtctgaggtccatggacgaaccaattcagacatcccgtcaaagcaattaaacaaagagaagctacgccccatggatctttgaccaatgacaaaatgctgtatggtgggtatgttgctgccgtcaacactgtgagtccgacctgggttccgaagtagatggggaaaaggcgcttttggaggataatgaactccttcattggtaaaaattggtagcaaatttttgtattgataaagctctagacatggtgagtcatgagatttcttgtttcttcaggggacaagagacgtacctgatagagctcagtcccgaggagagagccataagagagaagatggtatgggagaaggctgcccactgtcctgcgaaaagagtccattctatcaagctactctgatagaaaagcttgtggtgactggaggagggaagatagcagagtcggagacagtggtagtactatttggctggcctagccgccgacagaatccttgacgtactggctgagatgtcgaccaacaaagtcaaggttgatgaattgatgaacaatggttttagttgtctatgcttggacagccgcccttagttgtagtctcattatgcaaatattgccttattttgtatatattctactatcatgtgaatgccatgctgtattgctttatattacacatatggagggctgcacggatttatttatatcctagactcataatacagacggagcatacaaaccacttgcgggataacaattctctgcatcacgcagttacacagagagatttgctttccagaatccaatccaacaataaaccgaactggatcttccgccagttcctacggctagatctcacatgcatatatccagggagcatgaagcatgaatgagcgatcacagtggcaccacacagcagtgccccatgttcacgaaagaagttcattgacactctgagctgttggaccgagaatgggaaatcagcccgtctatgacgccactgcatgaatgactccttagggaggtgctcgtcgccatatcctcggactttcaaaccaattgacattaccaagaaggtaatgtgacctttccaaaccccagagtaagaaaatatataagaaaactggcagtttggatcaaacccggagtatatccagcgtgagctcattgttcttgcagcattgagggggccaatacacgacgtgtcttatttttagacttcagattgaacgttgcactagctgtacttccctcgcaactggtagcttgtcaccatagcctgaactccctgtcttctgtgaactgttggccgctgtcggcctataggaaatcgtctctctgattaaataccaatttgaacatcagacaatggcaattaccattgccatgtgggccatgtaatcgggtcgtatataaaagctgaattcggagatgtccgaatctacaagaagatgctttgacgacaacgtgtaatttaaagtataagtaggcgggatacttatccaaagtaccgggggcacgtaggttaccactgagggaatggtaagacggttttgccacgtcaaggagtctaaaactagtctggtgggctctgacaagcgagtcttcgagccagtgagatgggttagagctgagagtttcatgggctgtggcgaatcccaagccactagaaccaaggaatgaaagaattcagggcagcaccatgtccatgcacatgcccatgccgaggatagcctcttattacaccccctcgtgcgaccatcatgaaaccttctccaagaatgcgcgagtcggcacaggagccttttctgcaaagggttggcaagctgagaaaggcaggtattttgacatagtcaggtaaaacagcatcacgaggctgaaaaggcggaggttgaaccagtggctttcagaccgaatcactgattacagaagatccgttgtacaagttgcgtcacacagtgagatcaggcgtgactttccctcgtgggcgcacggcctgtataaagccaagggaggctgacggcgaggggccttttccctctgagttcctgtgctggatatcaactcggagcctctgctgacgagatttatatgagatatgcaacatccccgagcccgaaaatatccctcaagaccataagaccgtaaaaaaacaattctttacaagataaagatggaagatcagtctatgagtcccaaggatgatattctcagccaaacacaagatccactggagagaaggagactgcaaaaccgcctttcccaaagaaaccaccgtaggatattgccccaaacagagacgacgggttggaaactgacagagcctaggtcgcaagattagggaacgcattgcaaagcttcaagatcgcgtcatcgccaacgaactgagagctgcagctgctctaaacggatgggatcagttatataatccttcgctgttcccgaggtctcattcctcttactcggagactgagcccgtctttacctcgcgcggtgtctgtgtctcccctttaatcccagaccaatgtacctcattcatgccgtcatatccaccgttctcgcaatcatggccaaacgacctcaacacattcccacaacaggcgtaccctggcgacctatcccaatttactggagtcagtgaagcaagtccaatatgtcccataacaagggctccagtacagctgaaccatatcacatcaccacccagctctggtatcagtggggagacataccgggaaatgataagtacaccggagacgttagtaccagactctttgtctacagcagcacccaatcagccgctgtactacgttgcaactggtcagtactccaactgcacggtatatgagttattatctgagccaagaaactgataaaaagtagaacaggcattaccacaaattatccaggtcatcaacaccatgtctccccaatacaaagtgattgttttggttcccccagagtctccggcatcggcgtctatggctgtattcccttctccaaattattcatatggttctggtcataccgggccaaataatggtcctgcagcacagcagtctgactcccagagcctgggttgtctgtgttatcctcaaaatatacaccctgggccgcctgcgtactccgcttcaaaatcatggatgggcggggggtcatatttgcaagcttgtccattacacaagatggcaaattcaattaccccggggggagcgtttcctgttaggatgatatgagtctgtgtggcggtgtataaagatagaagtggtagagcaggggccgatagtgggatatatacaaagaatgggaatggataaattgtgaatagctagatttaccgacagtgaaagcttatggagtgtatcccgtataatagtggtccggaatatataagttgactatatgaatgaggatacttcgaggtagacttaccaccctaactggattgaatacggaagacacttccaatgaacataatgaggtaatagtagagttaataaaaacggtctttatcttcatagttccacgcaactggccagatcaaatggcaaaagagaagaattaaaggttaaccgaccaagtacggaattccacagacacagactcgaaatctattggatattgtattgaagacttgtgtaattgcttcagaatactctatatctttgcaccaaatataagccaaacatgagagcaagaaaacgagtgaccatggacagaaaagaataacagagcacacaatattgaaagcaaagacacataggaaattctcagtcacagtgaattcgccacagctcccgatcacagttactgatatatccagtgcgagtatgcagcatggcagtattatcactaatcagcagatcacccttctcccaaccaaagcgaagacaaactctatagtcatatgtgatgcgatccacaacctgagctagatcattatcgtcattctcaattgaaacctcacaggtcgagaatttggtcttggttgagtcccatggctgatgccaacgcagacacggaagaccagagatagggtgcttgacgatcaacggcaaattcttgagttttgcattccagaacccatcgttgtccatagcccaggtaattgtttcgagacgttcggcagaccatgggagaggtaggtaccggaaaaacaaccgggagctcgcaaacaaggtatacccattgccctttggcgcagtagcaggacaagtgaagaactgatagcccggtgggtgttggactttcttcatctcgcctgtttctgggtcggtaatctcgtcgaacttgaacatcccatcaaaatgcattggcatagcctcgttcgaggtcacattgttgcccattttgtcagagcggccgttgtcccgtactttttggattatgccaaagctccacgggagaatagtacccagctcttctcccttttggacgtagagatcttcttctagagtctcggaaaatccacgtaggacaatcggggacatgccattcgacagctggcggacctttctcatggggatggagcggattgacggtggaggattgacattgtcgatatcggcggggcggatgatgagtccgcagggatagagatgctcgaacttgacagataagccgtcctcggtccagtcaaagagactcgacctttcacggaagaaatatggttgtccgtttttatagataaggtcgtgcgtgtcgcgtacatcttcagcgtgaaccatgcagtataaaccatccagtccgacagccacaacagagtgccaaggcgtatgacccagtgttcctcgcatctgtggaacaagcgagatagaaagctttttctcgcctgcagactcgtggatagacagtcgtacgtaatctttgcggttggctttgatggccgccgcgaacatcttgccccgaatgatcatctgccgtgcggtctcggcaatatgcgcttgccgagcgcgttttgacatagatttatccttctcctctagatgagccagatctttggttagaaatttaatgtagccccggtatgttaggcatgtatcattgtcggttttgatcgcctccgtcgcatcgaagctcgggtcagcaaaggtgtacatcagttctcggcggagacaactagcgtgggccaaatagaatgcctttgcggactccggagttgaggatgggaaccatggatgctcgagaagttcgaaaaggcgaataaatttgacatgatggagctctttttcgacggccatttttcgcagggcctccccataatcccaaacggtttcatcggggacgctcaggagatctaacacatgtcagtattccagctaggaaaatcatctcgattgtgttctttaccattgtataccagcccatccgaactgatgtagatatcggcaccaggggcgtatactgcaccgatattttggcaaagtccattcaaatgggccaatgccaattcttccccaaagtcgggcatagtacccagcaccttactgcgtgcattaggcgacttgaaaggaaatgcgggcaatatcatgcggatgggctcttgtctggcgatttgctccaggacaattggaacaaacgactcaaagcccttccaggagataccggccttctcaaagtcgacaccatagctttcgatgatcttcaatacctccatagctatcgatttattttccgataaagtattcgagatttcagaggtgaatccattgacattttgttgagtaccattgccgtttgaggcaatggtcaccggatcggcactgtcatattgaggcgtcatctctacagtctgcatcttgactttctgattggacattccattgccgaagaatgggattccattctcagcgagcttagggtggtatgtagtgggaaccatttccgcacccggtgccaaggcgaccattgtggctcgatgtggaatgtatgtttccaagggagatactctgagccaggcactgatctacccagaaaaattatgagacaaaagcttgattagaaggtaactgtattggtctcacttgagtcctgaggaaatagataagatgtgttgttttacctagaaccagatggtgctatataacctgcatcggctaaaacagcaccagctagataactgacctcgagacaggaccgttccgatgactgtaactcctaatgcggaccaacaggtcaagtcttaggttcaacctagggcatcccagacaggaatggccatcaccctgtacaacttggggcctttacttctctacttcatcccatgaatgaggtaattgtggagggaattcgctaaaaagccttggccaatttggtaaaaggcttgaagttagattcggtagatcgaatgctgagtctgagaagcttaaatccaaaaagcttcactcaaccgttcagtgttgttagcaaagatcatgtagaaccaaagaatgaggtggttggaaggatattcccagcgtaaatgagaaaagcctcaattatacatggtgtccaatgactcgcaatgcatccaagtttcaaatttattggacagagctaagcacacgtgttgtgacacctctgctgtgttccgattccacgctgctacttgattcacaagatagtgttcgcgaaacctgcagctcactctttgagctcacgccaatcatacttcataacccgagtaacaaatgcagccatgtcatgtgttgtcaattgactaacaaggtagcatgtggcgtctaagcctgagccgacccctctggccgtgatgagtcgaacaccgtctcattcaacagacccccatcaatgtatcgcctgtacagcacagtagtagtatgatcccccggagcattgaactgggcacaaatatctcgaagtctgtcaagagcatgatggtgggttgtaacagtcattccgccgagtatacccgcagccccgagcagaaaggcgcccgtgcaaatcgacagcaaaatcctggtgcctgataacaaagcaacaggtagcgctacaaacttgcgaatcaaatcaagctctggtgtgctgttttctagcaatggctgcaaaactgacgggggaccacctgggatgactaggatatgaaagtcggaaattcgatcgaccgcgtctggcaaaagcaggtctgcatgaaccgtaagcaaatttgcagcacgaatcgtggggctgcaagccacagttgtgatttcgaacattcttttggggttttctgggtttcggttgtgcgagacatgggataggacttcgatcgggcctgcaaaatcgaggatgtctgcgccaggaaacaggaggaccccgactttgtagtacttgttggaagatctaagagacataattgccacgacaaattgcaatttggtcttgcaagacgtaccgatgtagacgtttttttggcggaagcgtgggaaggataaataacagcagtagtgagattctcagagctgattctgggatttcgcttgaaagagattagaaaggctgaagtgcattttacctcaaagcgtttctgactctgctgactccgaaaacaactgctcgactttgtccaacccgggtctccgcattcaccgattcgacgcttggagattcttgcaagatgtccatgcgcttggaaacgaggctgtctcatagccagtactcttcttggtgtcagcagctattggtttaagtgctcgtagatggatcctagtcttctagccacatcttcaaccagtcttggtatatgcctagatcctggagtgccagtgtgccagcacctccctgcgcgacgcaacgacttcagggagagttcatcgccatcattgaactttcctggactcataagtactattgggagtagcatttggaataaacaaaaagtgaccagaaataatataaaacccaattgattcagaagtcataaccataactattgttgtaggggattgatactcctgcctggatttccagtaccgcctttctaattaggtacgatcaatttcaatgcatctgctatgggggagaccatgattaattaccctagggatgtgggctcactctactccgtacagctcctcgctgaatggagaatggtggagtgaaatgtaaatctgaagtagagaagagaagaaaaagagggccttttattacaagctcattcttgaatatcgctgtggcgattaactacttttcgctgacgaaaactaaccagagaaggaagcaattctactccgagccttatggaaagggaaagactctgtctttgcataatcctcggtctacagaaagcgtattagatccaaagtatcgcgatttaagattctgtaagagagattatacacatactatatgttcaacgacggatatcacactgcagaaaccctcaactcgtaagaacagcctcccctgcaataattgaaggaaaaaagtttgcaaaaaaaaaaaaacgacaatcatgagttgaaccgaaaagagactccggcgccgcgctgaagaaaaaacaactgaaaactaaacgcttttcgcctccaatcactagccccacaggggtggatgaatatactccgctgcgcgatccagtatgttgggcattgtccattcaccgctagcggagctttctggcgtagggggcggaagggaaccaacgctgggagtcatgttcgcctgcccaggaccatatgcccccatggaagcggaagtcgggttgaggttaggattattggagtaaacgggcgtaccattgcgtcccattgaacgcgtagatgggtttccaagtgcggcaagaagtttttgcaaagcacgatgtgttttcgctagtgacttggcccattgcgtttgtggatcgggggggatcccaaccggagaatttggatccaccgggatgggacctgtgaggttcctgacgcccgtgattgggtcgtaagtcccgagtgcttggggcggcgatgtcatactggccacagtttgggcctcgttggaatcataggcacgttccgtgcttgctctttgggcgatgatgccctcgagtgagtagagaagattccacacattcgggtccgctttcgcctcatcgatgacagcaagcaggaatgcggaactaatcgcccgctgcaataagatccaggaacgagctgcgtgggagctgatgttgtgcatttcgatgtaagcttcaacggtcgtcatcagattcataatgcatttttcgcgcatgctggctgcgttggcgtggctcaagtcagccatgggtttgagcgctggccggcagagctcagaggcgaaataagaagcatgcagttttaacacaacgcgctccaggtgctgcgtaggcgtggaacagtccattgcctctcgcaggtatggctttgcctctaccatgatcttctggatgcggtccttatatgtttgtatgctttccaagcttatctgcgagtgcgggctcaacatgcgaatgcggacaacctctagtgcaagagaaatgacacgagagagactttcgaaataggataaatcgccaggtttggagccatccctataagcaatatctggctggctcactgcagtggtggaaggccggtcgtaggagagcgaaaaatggctgtcttgccatgccatggaccacctattcatgtcagggccacatactttcgggctacgaacgaaaaattatcttaccaaacatgtcgtcggcggtatcgttcagctgacgagaagcgactcgactccacatggagaccgagcgccaagcccatgcgaagtgtcatgccgagcaagacataagaaattccaggattcatgttgtatgacaaaacgtttcctatcactaggagagtttgaattgcctgaatggtgggttgggagaggaaatttgtcatgcggaggcactggtaagagcagcacactattcaaagtgttagccaacgactccaataagaatttcggtgtaggtcgcataccataaacctgagaggttaattccctttccttgctcccatagtcggatgactggcacccagaggcaaggatagcgaacagtagtcccaggtacgcaatgcttaccccgaaaggcttctgtgcttgatctgcatcggctaggtactcgccacccatggaagctcttgttcccagcaggagctcgagtgtgttctcaaactcaaagatgtcctctaaaacagggtatatggctcctgaaatatccttgtagtagtagaataatctacaagaaagcaaagttagcccaaccaatctcaatcaaggggttcaatttaagaaggctactcactctctgcactgttgatcagtgggaagggcgctgcagacggcggtaatatcgaatgttgacatatcggaggaccatagatcaacaaatggatatgtcgcagactcattgtccaaaccaagcttgggcagtattcctccttccaaaagtgcctgaagttgatcagacccagactgattgtttaagatataagccataacagagcgagatcccaaatgaaccgtgcctttgccaagagtattggcagcatggatgccctcgcgttccggcgaggcacacttggaacgggaactcgcatcgccactatgcacgcttccggtttccatggaggctgggaggccgtcttccgccctctctaacccgactcgaagggaggaaatagtagactccatttcctgcaacctattgcgcacattatcccattcctcgcgggcgattgatatacggccaccacctgtggcagggacactcggtcggcttaaggttggctcgtgtttcacttccgctggggtttcatcgaacgcatatgatgctgaatattcatgcacgggtgccgttgacccactagggacagcgctatcatggaaggcttgcgatcgcttcttggaagggcgttcgtaggagcaaaggtctgcatggtcgcgcttaacgcacccgtcacacggcagattgcgatcgcatttaaccttgcgcgcatggcaggggtagcaggcttttggctcgcgagccttgcgcttcgtgcggatgatagcgtctacctgagactgcggcaaatcggagacccctcggttggacgcagcagccatgtcggacgcaacggagggcgagaatgaatttgatgttgggtaaggagacgtcattctggctcaaaaaaaaaagacttcggtacaatatatcaggcgatcttgtgaagttgtcgttgtcgttgtcggcctttacagcggtgtttcatccggtcattggcagcatgggggtggaggatcagaagcggtttgcgagttggaaagcgagttcaatacattaggcaggtacagttccataagttcatcagttaaaccagagcagcatgttaggcaatgagggctcgatttgaaattgcacacgatttgttcaagggacctgggattaagcgccgggaccatgctagaacggcacgtgatgtggggcgtccaaatggggaatcaagccctacgtcagtatggtatgcccttgaaaccttcctagtctcgttataatttgtaaagggcgtaggaagttggcagtggatatctattgtgtattgcttctagaacttgcttaagaagaatgattgcttttgatggcaatgtagtcttgtaactcgcaccgatgcttcaggctgttccatttcatggtctcgatcgacacagaccaggaaatctcaggccatttattgtgaaaagaacaattccatgtgtaatattatggcttgaagtgcttattggataatgatgtcgttacaatgccctcgaaaaccacgtagacgggcaattttccactggggaaaagttaaaaaagccccaaagtggtggctatgcactccagtctgaggcagtccaaaccttggaatgccatttttttttactatggcgatacgaaactaaatggcatttataataaggagtgccaagggagacttcccctaaatggattagaccactgcgccaacagggtttgccctaacaaagagtatggatttgactacggagtatgctgtagtgtacatgtcgggatgtatcctagaaaacaatgacagtatcagcgggcatagactgcatctgtagttagcatgacaccatgacttcaatattagcacgtttggtaaagcgtacttgtcctaggtacagtctgtagtgccgatttagatgatttagatgatttagatggtatttcgaaaagtgcttgcaccggtatctcaatatttgaacgttacttgctgttcaacgtactctgcggtttgctgctgattatttgcttcgaaaaagcacagaaagaaacagcatttttctactgcggaaaacgaacggcacattgtcccgtctaataaactatattgaactcgtctttaatgcgatcggcagacgataatttattatgggtcctgtatatacgcggggagacttcctccatatatgattggtctgttgtgaatatcctgtgagatgactccttaacggtgcgaggatatcgatttattatacggggtaccccatactatgtggcccttcccagaggatttgcaggctctttagtaaaaccatcacttaaggagaaccccctaggcgatctgagtatttcgaccataccacacgcttattctccaatgtattattggtctgttagggtgttctagaatgcttggctaatcgtgccaagcgtccaacccaccttgatttctgctgtgttgacgatcttcggggatgcaaaagcgggttaccccgacgattataaaagtgaataagaacacgccattctccttcttgtatctagttgaaattttaaaaaataacaaatgagtatgagagtatgaaagaacgctgaaataacaataaccttttgtcctatgatgccgcccggggcatctttcgatgtaagacgagtctaggtacttgcaatccacatcgtgtcattgtcgcacggggctgacgctgtatatagcatgtgccgtagccatgggccatccaatctatgatctgctttgccacactaacctcgatatacctcatattgcactttgaccaatattgtcatccgcattcgcttattatccagtatagtaacttcaacttcaaccactggaatagtcatgatgctaccgtcagccgtacttgacaagtgttgccctatgactgtgggttctccggtcgatgttctcatcatatttagaggatcactctcatatcctgacatcatgcttgccccagtgtcatatagaagtccgcataccacctgctatcagggatacgaatagcaatcttatactaagaagaaatcaggattgatcaaacgagaattgttggggatataaagtgcgaataaagtatccatcgggtgggagcattccatccagactaatggccgctgatgaatacgtaggaccgggtccaaccagctatttgtgaacctctcgtatcattacgagtctataaaacgaacttccagggaaagtcactcctgccatctataagtgtcttgcttatagctcaaataccttcgggtcttcgcgtcaggggtgagggggcaagggactatacaaagagaaatagatgtacatagtagcattgaaacggttgttactgtcatttccacttggtcaattggggtatatcaaagaaagcgttcagagttcgaggtagcccaaggagtatgccttcgcagcatacaagacacttactttggcagatctatgcctcgggttctttatattgaatctttgtgaaagcgttggcgagtgagtacaaggaaatggaacttgtttgaacgatctgacattgatacataccattttggttcatcttggcatgcagtttgctgatcgatcttcctttgtcttgagtcaatactcatttcttgtttttgcttgtgtaaattgtgatattttgccaaaaaaaacttgcaattgtaagtagtctgtgtatgatattagaaatgcagtagatggtcataaaagcaagcttgaaaattaatggcagcagccattgtctgatgttcactagggtgagaaaaccatctataacatcatgatgatcgatcccttgaagctagttcaggccctatcatctccacggagaccagggcgatggctgagtcgtgtggtacaaggtcaacgaatgatttttcacactaaatgagtggaagctgcacgacaagtcgaacggtttaagatgcgtccaagttcctcagctttcattttattaatttcgctagttcatgtgtcgacattcgacaaaagatgtggcggcctgaggcgccatgaacgggacggaatatctatatcccggctgaccaattgagagaagtgacgtaccggccagctgccagcgttgtttaggtctgtcacctaactcagcttcattgacactgacattgtttttttccttccgtccacctgagacgaagcacctgttgtcgctatcaaatctgatcttgattcctctcccaatatcttctttcagcttcgatcaccgtaacccgctaacgaagctcaaccatggagggcaaccccgcggagcacgatgaggctgtgtctcaattctgtgctatgactggaactgaggcttcagaggtaagcttcttgctgtgtctatacataacttagtcgctgattttgagtgcgtgattgtctaggctcaggaatatcttgttgccaatggttgggacatcgaagctgctgttacggaattcttcgcggagcaggacgaagcttcacaggatgccggtgctggtggtgcgcgaccactaggcacagagggtagctctggagcttccgcggggggtagaactctcggcggaagtgccgtaccagcttcatcctctgccgcagctgggtcctcatcatccgcccgaagcgctgcgcccaagaagaagtttgctacattgggagactttgcttcggggggaggtggcggcggtggtgattcttccgatgacgatgacaccgacgaacatgatttcttcgcgggtggtgaaaagtccggactagctgtgcagaaccccgatgatttgaaaaagaagatcctcgaaaaggcccgcaggtactttctcctagagatgctacgaatgttgaactcaactaacattcgaatgtcaacagggcgcagcctcctccttcagacaccccggcgccaagggaatcacatttcactggcactgcccgcacactcggtggtgacgatgcaccaagtcaggtgattgaaaacccatcggcgcctagtcaacagcgtgcccagcgtgttcaacggactcttcatttctgggccgatggattttcggttgatgacggtgaactgtttcgatcagacgacccccgcaatgcagagatcctggacggtatccgccaaggccgcgctcctctttccatcatgaatgttcaacctgggcaggaggttgacgtggaactcaagcagcatgaggagaagtacaccaagcccaagcccaagtacaagcctttttcgggctctggacagcgcctcggaagcccgacacccggcgtacggagccaggcgccaacaccctcctcttctacggctagaccatctactcgggagccaacgaagcccaacgtggacgagtcacaacctacagttaccctacaaatccgcctaggcgacgggactcgcttaacgtctcgattcaacacgaccgctaccattggcgaagtttatgcgttcgttgcttctgcgaccccggatggtccaaaccgcgcatgggtcttgatgacgactttccccagcacggagctcaatgactgggctgccgttctcggcgacattcctgatttcaaacgtggaggcgtcgtgatccagaagtggctgtaaatgcactattaatattctctttcgtcttcagagtggttcaaaaagcgaataccagctgggcagtggggtttgtatggatgaacgttacatgacatatctgataccgaagagggaccttcagatttgctacgtagatcaatggaatatcatttaatgacctccaaattcaaaataagtggttaaatcgacctttcatatcccatactagtgcgtccacgttgtagaccgaaggttagtcagaaggcgattgataagcgcccgaatatcggcctccgcccttgaaatccgtcgttgagctttcagttgctgcaacatttcttttctccaaattaaacatacaatatacaactatgcctctcactggggtgaagaatgtcgtgctggtacgtgcaccttcaatcccttgccagtcctgccagcgcgaaaaaaagaaagcccatgcccctcatagcttatcgataacgagagctgctcgaagccatgggctagacacccaagcgcaatttcttagacaaaactaacaagaaacgattggaatttagatcctttccggcaaaggaggtgtgggcaaatcctccgtcacacttcaactcgccctcgcgctctcgctacaaggaaaatctgtcggcatccttgacatcgacctgacaggaccctcaatgccacgcctagtcggactcgaagatgcaaagatcacacaagcgccaggcggatggatgccagtaccagttcacggagctgaatctgcagctgagcccgacgcctcagcaccctcaacacaacccccacgcggttccctccgctgcatgtccctaggcttcctcctccgcgatcgcggcgacgccgtaatctggcgcggaccaaagaaaacagctatgattcgccaattcctctcggatgtcttttggggcccgactgattacctactcatcgatacgcctcccgggacgagtgacgagcacattgcgctagcagagcagctgctcacactctccaccacagacgtagcggcggctgcgcaaacaggcttgcctagacttgctggtgcggtccttgttacaacgccacaggctgtggcgacctcggacgtgcgcaaagaagcgaacttttgcgttaagactaatatccctgtgcttggagttatagagaatatgtctgggtatgcttgcccctgctgtggggaggttagtaatctgttctcgagtgggggaggacaggtgatggcccaggaattaagccttccatttatgggcagcgtgcctatagatgtgaaattcggagaattggttgaaggaaagatggaggcaggggatagtgatgatgaggaggaggacgagagtccaaggactcaaccacaagatagtcccgccgagcctgatgatcgaccgctcgttgaacgttaccgggatacctggtcttatcctcgatttgagggatttgcgcagactcttataagggatattgagtgcccgaatgctgtgtagcagtgttcgtcgtgaaaaaattgtgtttgattgcttgttttctagcgacatatcttccttctcctatttgcattgcgtcatagaaggtgttggcaatctctgaatgtcaaatcattcaattataaagtctacacccggagctcgagtaggtagtgtatggtgtatgtaatcttcttgcaagataactatggtattttccctgatacctaagtcccaaatcgccaagcttcttaatcccgttcacttcctgtcaagaagcgagaccgccgttaatgccggtttatttacgtgtgcctctgccgaaagtagataggcccactaagccaaggtgaaagtggctttaaattagcaaaagatagaacgtaagggagcgtattgaaatatatataaactcccacatggtactctagcacatgggcttcaccatttcctttggacttgttctagatcctaactcacggtaccgtagtgaaaagtctttccgaaaactatatggccgcacagctgcccagaaattagcaacacatgccaagggtcgtatgcgccctccgccgaaaaacccagacttccaagtcctcggcgccgaggctgaactcacgtcaagctctattaaacgtgcaatcacagatcagcacccaggaacgtgcaaatttacccaatatgactggccaaagtgatctgtagagagtatatcatcgccggaagacgtccttcgtccgctcttggcgtccgctcccaaggcttggcgccaactgccactcttattcggccatcgacaaagtcgccttgtacttagccaataactgtcattgatctctttatgatgggctaatactgacatcagaatggagctccatacggtttaggccaagttcaggaaaatattttatcacaggacgcacgcacttggcaatggtcgtggcgagtttgcagctcttataagggcaccatgaaagcagggccgtagaagactgctaaaatcaattccttttctagttcttcaaatttctcttcttctgtgatccaccgcagcccctcgtcgctatggtatcggtaataaccgcgaagtatgactggattctagcccttaccaccatcgctttcgttttcagtgccttcggcaatggtgccaacgatgtcgccaacgcctatgccacttcaattgcagcccagacgctcagcatggccacggccggtgtcctggctatattcaccgagtttattggcgcagtagccatgggcaaacgagtcaccgatacaatcaagaacggcatcatcgatatcaagcgctttgacgacaagcctggtgcgctcatgttggccatgggctgtgccgaggttggcagcgcttcgtggttgatgttcgccactcggatgggctggcctgtctcgaccacgcagactatcgtcggtgccctcattggtgttggttttgcgagcgaggcttctatcaactggggctggacaaagggcagtgtctcccaggttgccgcatcttggggtattgcccctctcgtgtcaggtgccttctcggctataatcttcggtactctgaagtacagcgtccttgaacgtcaagattccttcaaatgcggcatgcgtatgattccagtctatcttgccttgacaggagccatcctcgccctcttcatcgtcatcgaagcccccacggcaccctcattggaagagtttggtgctggcaaggcagccggcatcattgtgggtgtgttttttggctgtctcatcattgcatatgtcttcttcaggccatacttcatccgccgtctcgtccgaaacgatccccgtatcaggttctatcacatccctctcggccccctactgctgagggaaaacccaccgctatactttccaggaaagggcgatgaggccgtgattagctactatgaagatgcttacgggcaagtgcgagccggtcagaaagacgcagacaaagaaaacgtcacattgaatgcagactctgtcatgcccacgccggagattacagcaatgtccagtccggcccacataggggatgatgaggagaaggttacaccggaacctaagccacagaaaaagcacctcgaaccaacggagcggttcatcgaccctgtccgacacctatcctggacaaatcccctgaaggctctcggttatatcaaatggcttttgcttcagggcgtgacgcgtgatgtgattacacacgactcccctgaactacgagcgatccacgcacgtgctcaccggtatgacgaccgcgttgaacatctctggacatactgccaggtggtgtcggcgatgatgatgtcaattgcacacggctcgaatgatgtggccaatgccgttgggccatgggctgctgtgtatggcacgttccatgccggatatgtcgagaccaaggcacccacccctatctggttcttggttattgctggtctgctactcggtcttggattctggttttacgggtaccatatagttcgtgctctgggaaacaagatcacgcagatgtcgccgacgcgtggattcagtgttgagcttggagcagccatcaccgtgatgttggcttcaaggcttgccttgcctgtttccacgacgcagtgcttgaccgggtccgccatgggcgttgctctcatgaactatgatcttggtgctgtcaattggaagcagcttgtctttatttttggtggttgggtcttgactttgccttgtgcaggattggtttcgggactgatttgtttgatggcgttgaatgctcctcatttgtagtagtagacagatagctacctgtcatttttagttttctatcccatcctagcttattattaagctgataaactgaatctaaaaataaaaataaaataaatgcaagtatatccgagaaagaaaagacgattcatcgccggacatattcaggtttgtgcataggcgttatataattaaatcgtcacgatccagtcgaacggcgggtatccttctaaacacacaacggaggatgaccctctatttggtccgcttgtaaatcttgccaaggaaggcctcgaagacttccttcttcagacccttagactcatcgacggccgcaatcttctcgtgcagctcgccaacaaccttctcctcgtactctttgtataccttctccaattgtagttcgttgaaaagggccttgaccttggcctcctcagcagcgtccttgcggccgtaggaagcatccaggagctgacgctgctcgggagtgcagcgctggatggcctggttaacgagccaagagcacttgttgtcctggatatcggtaccgatcttgccaatgacagatgggtcaccgaagttgtcaaggtagtcatcctggatctggaagtattgccccagaggaatgaggatgtcgtgggcctgcttgagattttcctcggaagccagctgcaggtacataagagccaaagcgacaggtaggtagaagctgtagtaagctgtcttataggtgacaatgaacatgtacttctccatggagaagttgtcgaggttgacgttgtcctcgggggcggtgatgaggtcacaaagctgacccagttcagtctgccacgtggtctcgtggaagagctcgacgatgtcaatgtaggcgggatgcgagcggaagcgctgcttaaggatgaggtagatacccgcctccagcatgaaggagtcgttgatagcgatcaagccgacaccctcgtggcggtaccagcagggctggccacggcgggtaatagaggagtccatcatgtcgtcactgaccaagaagaaagcctggagtaactcagtcatccaacccaggatgctgaggtgctcgaattgctcctcggtcaggggctgcttcaggagagcacgaccggtatcagggaccgagaggccacgattgagcttaccgccaggaacattgatattaagagactagagcgcataagatggtgtcagctatgatctttctttcctcaagaataggcatcacgaggttttacttgccttctcgaaccactcgagcgcattgtcagggaggttgtagcgctttgcgtgggcaaggatatcctgggccagtgaagggaaaatagcctcgaagtcggcgcgcttggtagtagagcccatgatgacgaagtgtgtggtaaaagatgacaatgatctgacaagaaggacgaaaacattcccacttccccgcagttgtttggtttgtttggtttgtttggtttgtccggtttgctctcgttactgtttctccaggcgcaacccgaggacgacgtggatttctcaaggccattgaacgatcttcgcgttgtttcagaatctacaagcattcatagctttcccaggactcttgatacacttattgttctttccggttacgcgagttgccgtctcacctgtatcaagaacgcgacgagggccgagaccatttatttacaccggacatttgaaagtaaggattgaaccgctacgtggtgggctttctaccaaaataaggatgagattaaattgtcgcaaaacgggttgataaactgaaagctccatcggcgctacaagactgtctttgaacgttttgcctcggaacacctacctgcgacgaagacgcccgtcatggaagaacctacggatgatggaatccgagagctcatgtaccagctggaaaatgctgcaatcaagtgctctgagcgatgcctttatcaatcatcaaaatggtaacaataataagcttcattcgaacaggcctcacgtgctaatgatgttcatggactcagggccgctgaaatgcttgattccctccggcctttagatcacgaagacactgacctcgagtcaccgatggatatttcagaccctccgccagcaacaaatccttatctcaaagtgcgcgacccagttgaagctgcccttgaaacgcaagagtcctacaaatacctgctggccaaatcttatttcgatactcgtgaatatgaccgatgtgcggccgtattcctccctccgaccacaccaccagttcctttgtcaattacctctcccaactccaagccgaggccatcgcggacttcacacaagggcaaggacaaagcttcaccgtttcaaagctcaaagacccaaaagacccaaatacagcaaaatccatatccaaaactcagtcagaaatcgctcttcctcgccctgtacgcgaagtatttagcaggagagaagcgcaaggaagaggaaactgagatggtattaggtccagcagatggtgggatggcggtcaatcgagagttgtcaggtctcgctagaggcttagatgggtggctatcggaacgaaccgcacagggtttagatgaccaggggcagggatggttggagtatctctatgctgttgtcttgttaaaaggacgcaatgaggagctggcgaagaaatggctgatccgctgtgtgcatcaaaacccataccactggggtgcttggcaggaactgaacgacctcttgggcagcacggaagacgtaagttattgcattgagattctcttccgtctgtactaatttcaacagttgaaacaaatcctcgaacttctgccgcaaaacgtcatgagcttaatattctacgtctactgcagccaagagctgtaccaggccacagaagacacatatcggtcgctctccgagctacagtcaatgttcccagaaagcgcattcctcaaaacacagcacgcattgttgctatatcactcgaaaggtaactaccccggctctgcaacacgcgattactccgtgatctaatatcattcagacttcgaagaagcatctcatatctttgaaggcattcttgccacatcacctcaccgcttagacagtctagatcactactcgaacatcctttacgtgatggaccagcgacctcaacttgcgttcgtcgctcaggttgcaacggccaccgacaaattccgcccagaaacctgctgtgtcgtgggtaactactattccttgaaatccgagcatgagaaggcagtaatgtacttccggcgtgcactcacccttgaccggaacttcttatctgcctggaccctcatgggacatgaatacatcgagatgaagaatactcacaccgccattgagtcataccgtcgagccgtcgatgtcaatcgcaaagattaccgcgcctggtacggtctaggacaggcctatgaagtcttagatatgtctttctacgccctcttttactaccagcgcgctgcagcattacgtccgtacgatccaaagatgtggcaagcagtcggatcgtgctacgcaaagatgggccgagtggaacagagtattcaagctctgaagcgtgcattggtggctggatcattacagccagatgatggcgggcaatcggccactggcgcaagcgctggctctgggagtcgcaagatccttgacccagaaaccctacaccaaatcgcgacactgtacgagcgtctcggtgacgaagaggaggccgctgcatacatggaactcactcttcagcaggagtccggcgctcctgtcaatgaaaacgcagacgatgacgacacctctgtctcggagcatggcattcaaagcgatgccgagattgagcattcaggagacgaagacactgatcagtcgcaacgacatcgccgtaatcggaagcctcgcgcgaaggctgaatcactcgctatgcagaacgatgactccattgtcagtgatacctggaacggcaccggcgttacaacaactacgtccaaggcacggttgtggttggcacaatatgcgtcacggaacggtgatcttgaccgtgcagaccagctagcgagcgagttgtgtcaggatggaattgaagtggaggaggccaaggcgttgatgagggacgtacgggcgagaagggaggatgcgacctaattacattgattgaatgaaatatgtatggattatcatgacagcgaaacagccatggatttgacaagtctttatgaataatagctagaagcaaagtctgtctctgtatgaatagtcttcaggtgtggtataattgtcattcgtagaaagaaaaggggtattaattatataagatatgagccagaggtttaatcgagatatactcgcccaacacagcaatagccgtttcatcgaagctcatctcaatccatggcgtccttggtccagagaccgccgagaccggaggctctgttgtctctgtcatatcataacaatagcgatccgaatcagagcggagttcccctcttccggtggatatatcttcagaacgcttgctgagactccatgagagacagccgtagaaataatcgcgtccaatatctgtccaagtatcacgcaggcagaaacgaaggtcatctgggcgtagatcacattccaacatgctcgagcccagaaaaaatatgcttcccatggaaggcagtggacatattccagtatcaacgaaaatggaaagagtcttggcaagacggtgcatctctttccctagttgagttgctatgggatcaaacaggacaatgccaaacctggacccctgcgatgcggtataagggttggacgtttgaagggaagaagcagattcatcagagcagagacaccgaacaaattcatccaaatcgcgatcattgctgggcttttcatacatctgcgggagtgtaaaacttcccagtgatgttcccggcgtccatatggggatagttgttaaaggagattggggtggcatcttgcgtttctgcttgggcgatgtaggcaccaaaagcttgcccgaaaggggttcctgcgccccgtataatttttgagagtgttctttgcgtgcagaaatgaatttggttgcccatatgggacgtgaaaagctcgaagattcctgccatgcgatctttccatccttctggctacgatgttgacgagatgatagattttcattgtccacgagtataatgctctcaagaacagagttctcctcttccgtgggaagtgtcgtctcatcgatgtagactaaggggggcaggggatgatcatggctgtcttttatcattgaatcttcaaccagcccttctaccaatggactcgcgtccataaggctctctccaaaggtagtgacggcttggtgagcctgggatgacgggggatttgtctcatcgtcggtgtctgaacaagtcgcttctgggcttcgagatcgcacaatacattgatcaagttgacccccaaccttgaggcgtttggaccatctttcacgttcctctagttcatctgcaggcacagcccgggcatgttctgctgacagctgcagttcatagaaagaaatacactccgccagcgttcggtccgagtgtatcttcaaaatccgaggaaatcgaagtgtggagtatctcgcaccagacggtttttcaaacccactacccagcatctcgacgatgaacgggtacttgaacaatttggttgcagtggggagagcttcgtgcccgtaatcaatatgaaagccttcgaacgtttcaggttcacgtgcataaaactcgccgatttgattaagagtttgcatggtctgaatgctcatgttatgtcggttaatcacatcaacgatttgaaaatgcggcaaagcatcgccctctttgacccgatctggattcagaagacagccaacaaaaaagtgtgtccatttcagccctttgatttgtcgcagatcagaagcatctcgcgcgttgtagctagctccgatcaacgcaaggtctaatgtgtctccaagacccggtatataatctttcttgagtttgatccatcggccaaacatatggtctacaccagtagagtatatcggaaaatagggctcgtcggaagccttcaagacatatccttcccaacgtttagcgattgctttctcaaaactcttttcgagccgatggtagctatcagctcggttgaagtccagaacttcctgataggcgagatccgctcggcccggaattgttttcaccactttctgtaagagcagtcgtctttcccgatggggcttggcaaggcatacgtcgtcatcgaggagaagaatgtcaaagaacatgatcatcaagtgctcgtacggttgtggcctgtatcaatcagcaaaaagacttatcattttatagaagtggtgatttacggagaatcattatcaacgccaatcatggtgccagatcttggaataaacctccgaattttgttgaaatccatcacttgaccactctggtcattccacacaagcagttctccctcaacaatacagcgggacgtaaattcgcagccaggcaatccagtgcggagcgattcttctatcacaggtatgatcttatctttatctgcggtcgaatccttgccacttttcgagaaaatctgaatgggcgtatatttgttagagagatcgacgtggatctgacagtattcaccatcgtatttccgttcgatgctcattcgacgaccgttgaccatttggtgacaatgtttgatacttcgagctttgtaataatcaggtcgtccaaccttgataccaggacgagggcgcatatgctgtagggcaattgcgttcagacttctggctgtttggggatccgggtttggagggaaattgtttattgggtccgaggcaagcatctccagcgccccttcgaaagagttctgaagctggagtaattgcggaagaagaaaatggaatttcttcagagtatagttttgtgggaaaacgaccggagagtagcttttgagaatcatgcgagtgagccatttcgcgtcccggctactcaatcgacggtacagttttgatagagtttcttcaacgtctacagctgtacgggtccggcgaacttgagggccagagaagcggcaacgcgatgcaattctcaccatggcacgatcgatttcttctaccgataactcctggcccgctgggatgtaattctcggcctgccgcatgacagtttcgacacatgctccgagatcaaaaccaccaggactttgccatcgattcagttcagaaagccgcgatgatcccaagcctaagcagcgcccgatgactcttgatagctgcattgcttgcaaccagtatactcggtccgttcgtttttcggggaacatgcaggtaagcaacgccaccctgtctgttttggcatcatggatggttcgttcgtgtcgagcgaaccactgggcgactgttttaatgtcaggattctggttcctggccgccgtggatgccttggccgttttgctattgtctaggttggacagcagatcacacaagagggtgaatttgaagcccatgacccatatctacgcgagttaactagtaactctgcataaaaccgtggaataatttgagatacagtcaaggaggtcaaaactcgcgactcccgaggtcgagactttggccgcgctgtccgaacgcgaaaagaggaaagaagatgacacgtgagcacgtgaccactttagccccattatatggagaaaatggagaaataggtgagtccttgtgattttgagggtatttagagtatccaggtgcgtgatctgccggaaatagaaggccaccatatttgatatcgagtagcgaacagttaaaatagcctcgaatcgatccattgccccgtagtcaaagcaaatgcgatgaggagcatttgtgcgatagctcttcatatctaggaatcatttcaaagagcatctcagtgaactctgaagactcatctctccgtggattaagtgccgcaaactcaaacccttctagatatatcccagcatctccccagtcaatcagccagactttgccctcggaacccaggatcaagttgcggggtgctatatcatagtgggtgagagttaacttgttgaaaaaaacggtttagtatcaggtggtgcgcgatgaaattgttgggtgatctcaagtcgccgattgaaccaggcctgtagttgctctgtcgagctgaatgggccagcccccgcgtctggaaaatggcaaccacgaaagaaacaggttatgcagcctactagggctggtagttgctcttgttctttgggtatggggataaggtgtagattgttgatgattgaagcagctttagagacgacgtccttgcgttcaatcggacttaggtcttcccagcaatccttaactgttctaccgcccacaaagtccatgactatcaggcatctagccccaaagaagagatcttccgtttggatactcaacactcgatggactttgggcactgggattgatggtatttctcccctctccccagccttcgcaatgaggtcaaggatattggcctcacctggtcgtgagcttatccctcctttaataatcaatgttcgtgacaagcgcacaatccgtgtcccttggcagttatgaagaattggtgctgtgttgaagagttgggtcagggtttcatctgaaacaagggaaacgtcaacgccatcgagggggtatttttcaggttctgggccttttctgctgacaggctaagagaaacattttgttagcttgaaataaccgtgtagggagacggattctcccacttcatatatgtcagaggtaacaagtccatattatcaccaagcggggtagacgcctagaacaagcaccagatcggcataggggatatagggctacttgtagaagaaaacagaactaccagatatataacaatgaggttataacatatggttaaatgagaaatatgacttgaagatgtgaagatatgaagagtgggaagctgcatgggctccgtacccacgtgagcacctcctagtacataagagagaaagtgaatatacaaacatcgtcgtgttagttatgtagaatctattcaaggatttagatgaatccacattttagtccctactatcatgctccctttgttctactatttaccgctcactttctccgcttgctatcgtgtatagaccaataaccttgttatcttattagatgagcaatatgcttgggtacctacatggatgtaagtataataggcagctagcactagtacccagccatgaatcagtccagagagcacaactttcctctttcccctcaacttgccctataaacttgtgcccactctctatctcctgtgaaaatgagtccttagtctcgtcagatcgaagctaattatagatgacattgtagcgaacctcctttctctagaatgtatcaccaagtgccctcttttcaacctgtgcgatttatcccctcggctgaaaaggaagacatgctgaatagcactgtgctatttctctacgctgttggccatcagccactttccgagggaggcagcctctggtgcctgtacatagatgttggcgatggcagattagtgtgtattgacgctacgccatcctagaacgttcctgccatcaaaatgccgggtggatcgaaggcctttatgcttattagccttttaccatacatctacctctactcttgatgaaatccgtcatacggtcaataactacgttgtccaaatacaagtcttagaaacaggatttctacttgtatcagggaactcctaacacagctacgggatctcgccgtcctccctatcgcccttacccaccaggatctcgctccattcaattacctcatcgaagagtccacgggccgggttcgagctgtactcgactgggatggtgctttatacctcccagttgggtcaaatttccattttatggataatctatttgggttcatgaccccaaaagtggctggcatgacacggaggatcgtcaggaactcgagacagcgttttaccatcgggctctggctagtctgctactcagggacttgggggaataacaagagagcaactggagtcgcagaaggcgatcgggatgttacggtacggcgtggagcggcttctcaggttgaaagacgaacaatccgagcactatctagatggttaccttcgggggttatcgtatagctgggtatctagatggaagcttgatgatacagttagtaaagcaatatgcagtggcatgtcattaacgtatagagccgagagttgatgatatggtatgtatggctttcccatcatttgtgaacacaagggctttagaccccagtttctggatatcaaattcaaggattgtaactgggagattggatcatctcactcttgatcttgaaagttgcttactaggcgtagcatggaaggtaaatcgaggaactaaagaggccttacctacggctggttgccatctgctattttaatcgagtgaaagatacggagtatgtaaaggttagatcttcaagagccaattcaaaggcacagctggcagtctaacttcactatagcactggcggctggagaatgcagttgtaataaaaaaattggatgttttattcataacagtaagtttgtggtagaatgagataacaggagcccatgagctaattcaaacctgaaaatggggttgaagactatgcattcgccgaacaccgagccatttgtatgaaatcaaggacgccattgtggaacaaaaaaggaggaacataaagccctctccctttagagaataccctgcttttgcaaatccaagtagatcctttcgggcataacgttaccctctgcatcctccatctgaacgacattatcccgtgaatctctgtccttcttccgatccttttcgagctgatcccaaagcgccatagcctcattgatactggtgatctcacggaagagattggtgttggaggtaatgccgagacactttaatccgtggacgtggaggttttcagagaagtgtttgtcgaatgctcgtcgacccatgtaggtgtagtttccgcaaatctcgcactgatattcgacaccgaggccatggagcttgtagagccagaatggaataggttttccatcccatgccagtggcaatttcaatgggttgtagataacctcctcgtcctcttcatctgattcttcgccggcacgaggctcgggacctgtgtgatcgagcccagcctgcacagcttcccattccatttggcgttcacgttcagtcataccctgtcggcgctcaacattgattcgtgtcgcctgtcgctgctcgcgcagaacattcgccaaggatcgaacttgatgttcgcgtcgtgcaacttcgcgctccttgaggctatgggccgaagatgtgccttgagatgctgatggtttctcgttggatgcgcctgctgctttgcgggcttctgccgcccgaatatgtttcttgccggtcaagtggctccggaggacgttctcattcttaaattccttctcgcaatctgcgcaccaaataccctcaccggtcccttcggtagctgggccagacgcaccatttgcagacttttcatctgtccaaccgggaacctccttcgcaacccattgtttttcgaattcgtcgtcgaagctggcgaaaagctcgttcaagggttgcagtggctgaactctcttgatgaaactctccagatagctagcaagctcgccaacatagttgaaataacgatcagagagcttgtctttccgcttaattggcaaaacaggggatgtgaagcagtcgaagatatcgaggtattggacgtatgacaagcgcttaaccccgggaagattcaggtaatcttcgtgaatagttgtgagatccagatactgcccaaagccttcttcgccagtgaacatattatcgattgcggtgcggggagcctctccttcgccggtctgacggcgattatatgcttgctcgaggttctcggttggttcgttcgggtagcgcttgtggtgctctttaatttcccctagctgcttgtaaaattcttcgaattgatcgcctgtcgagatagactgcacttccttctgccgcaatccatcggcgtcccggtagatctctaagagtcgctgggactgactctcaattctgtctaggaactgggagacttcatggtcgcgagccaagtggcctcgagcctgattaatcggtatatgagaaagtgtgactggcaattttgggcggtatactcacatttcggggctcttccgccacgcgatcagcgatagcctgttctagccgctctagatcctcgtggatgaacctttgatcttcgagcaacatattttcaatatgactgctgcgcaagaaaagctttttatcggcgcgcaaagtgtgttgacaaagttgcgtggcgatcgcaaaagacgttgacatttggcagctccaacttgcgggaaggtcatgtgactcgaacctttccaccgcgaaaagttaggccggttgacctcactcacgtaaggcttcactcttcgtgaattccgataccatttattatctgccgttgaaatactcacacttacatcatggcggatggaatcgacagacgcgccgagggtatgtggttctaacattgggacaacatgaagcatgctaacagcaactagagcgcatggaattcaacacctccaaggaggtgacggtcgcgccgaccttcgaggacatgcatttgaaggaaagcctgcttcgtggagtgtacgcttatggatacgaatcgccgtcggctgtgcaatcccgtgcgattgttcaaatctgcaaaggtcgcgacacgattgcccaggcccagtccggtactggtaaaactgccacattcgcgatcagtactctgcagatcattgatactgttgtgcgcgagacccaaggtatgtaccactctgtctaatctgatcagatccagacctaaccacgatccggtttgtaacagctctggtcctgtccccgactcgtgaactcgcaacccaaattcaatccgtcattatggcccttggtgattacatgaacgttcagtgtcacgcttgtatcggaggaaccaatgttggcgaagatatccgcaaactcgagtacggccaacacgttgtctctggaactcctggtcgtgtagccgatatgattcgtcgccgaaacctgcgcacacgtcatatcaagatgctcgttctcgatgaggctgacgagctcctcaatcgcggtttccgtgagcagatttacgatgtttaccgttacctgccccccgcgacgcaggtcgtcgtggtctcagccaccctcccatacgatgtcttggacatgaccaccaagttcatgactgaccccgtccgtgtcctggtcaagcgtgacgagttgacactagagggcatcaagcaatacttcatcgccgtcgagaaagaggaatggaagttcgacacactttgcgatctgtacgacaccttgactatcacccaggccgttatcttctgcaacactcgccgaaaggtcgactggcttgccgacaagatgcgtgaggccaatttcaccgtctctagtatgcacggcgagatgcctcagaaagagcgtgatagtattatgcaagacttccgtcagggtaattcccgtgtcctcatttctactgatgtctgggcccgtggtatcgatgtccaacaagtctctcttgttatcaactacgatctgcctaccaaccgtgagaactacattcaccgtatcggtcgatctggacgattcggccgcaagggtgtggccatcaactttgtcaccaccgatgatgtccgcattcttcgcgacatcgagttgtactactcgactcaaattgatgagatgccaatgaatggtaagccacgcagctataatatttctattgctatgctaacaatgttattgcagttgcggacttgctttcataatccccactgtctgatattgtgattataacatcttttcctacgccaaaaagcgacttggcttcattccttctggggtcttctgcaaatcgggtgcgcttgtattgttgattgaatatgactcggaattcggcacaatcggtttgaggaaaatacaaggccagctctagcgtggaggaaagggataataacatatttcagtaagtcgaatttggaacttgctaccattcactcaacaaaactaacaatccgaggtagttttcaagaatgccaaccgattcgcacaccctaggaggtgtttacgattttgcttatttctaaaatttcgggcctcggcctaagtagcagggactttttttgacttcggagtttctttttttattactttttgacataggaatcatgaatgatggatttgttttactttcgtacaatgtgcctctacttcttggccccaagtctctcgtctggcgacttaaattcaccagtgagatacctaccacgcgtcaacttctgttgctccatggttacgctagttaattcctactagagcgaacctctactagaaaatagtgtgaatggtaaatttgatttaaagattgggagcaaaacaagccaagccccccccccccaaagaaaaccccaactcagaactggaccaaaaaaaaggacacaacatatatacttctcagaacccagaacccagaaagaagatacggaccaacgccagcttcctgtattaaagaaatagatgctagctgcagagcgtaaacagcatagggagtgaaaggggaattcaaacgatgtatatgcgcaagacagaatgaggatatgacgggcagttgatgaggggagagagaagaacacagaagagaattcatgaagaacaagaaaacattgcgaaacagcaggtttatcatctttcaatccaaagctccaagtatgttccctcaatcaggtacggtatcgcggaacctaaataaagacaggcaacgagcgtgaacagaactggtttcgtggtagtcattgtcgatgtggatatcagaaagtggatgtcgtcctcaatgcgctagtccgcgtgaagccatttgagggtaacccgctgcgttgaactggtcctgttggacgggatcgattgctctctcgagaccagctggaagttcgagttagcggtgctgttcaatgtgagacgaggatgagagggattcttacatccttactgcattatcgtcgcctgcagatgcgaacattcccgggtctgctgggttccatgatattgagttcacgcatccggagatatgcccctccagagtctctacgatgttgccattttctttgtgccagatgtagactttcgagtctggagatagttagcagcgataccagaaatgacattttgaggtactcaccttcacttccgctgacgacaaaattctcggctgctcctccgaacgtgctgcgaatcacgaactcaccttgcttctgtcccttgaactgtcggacaagcgcagtggtttccatgtcaactagttggatctcgccctcagccagattaataagcacatgccgcgagtctttgctgatagcaaccgaggtcggtttgctcggcagtgggagacagtagtcttcttcatatgtaagcatgttgtacacatgaatcttctcttctgtgtcggcagcgacaaggcgtcgtccatcagggctaatggcacagtcctgtacacggaatccgcctttccacgtgtatagagactgaccgcgcatgctccagtgacggagctgtgattcggcatcgagagaggctgtcacaaaagattcaccatctggtgcccaggcagctgcagtcaccggttgacggtggtggttgatggtgagcagacaacgaccgctctaaaccatgcacagcccgagttagtatatcattatggatttacatgagatttaaggaatcattacctcaacgctccatacgcgtgccttcttatcttgcgagcaagtaattagttttgagtcatctggactccaactggcaaacgcaactccgtcctcgtgttccgtgagtctgtgaagaacactgaagtcggctgtgttgtagatcagcacgttatggtccttgccagcagtaaccagcttagatccatcgtgagaaaactcgcaataccatacttcatctgaatgctgagtcaagtccacaatgacatctaaagggaagtcatttcggtcgcacatatggtcagagtagagcgacggaggctccgcggtattgtgatagaagcagttgttgatttgagtccgcttgacgtgatctagtaagatagccaggcggtgttgcgggatcattacagaaggagaaatggattctgcggctaaaattagcaccccggttacaccacagacattaggcattagattagactcacttgacaactcgccaagcagtcgttcacgagacgaggtaacagagccatcccatccagtttgagtatgtaagacttcggttgagcacataagaagactaaccaagataaatggtaagcaaatcgggttctagaaatatctatagatcggcaataccttgatagggcgtgtagacgttcaacatcaaaattcaagggcgtcagttcttggcgaaggacgttgagagctgcagctagatcacgcgcttctagcatctcgaggaatttctgttgtcggagatagaatagcatctcgttcttatcggcctcctctgctaataccaacgtctcctcttgtgaagacttcctgtcgacctgttgtgacccggcatttcgaaacgactgaatcaagattctctcggcctctggccatcttccgcccaacaccgcatttcggaacgttgcgacccccgacgtctccagttcatagccgctctccgagcttaacagggatgccgactcattataacccagctcatatagactctgtatcaaaatccgcgtcacctcctcccggttatggccatagtaagtcgaagactgggatggccttttagagccatttgcgtgagagctcccgttggttgccgcttgtccgttcaaaccagccttcctcgatgatgcaagtgattcgttcgaggcatctacgaagccattttctgttgatgttccgtcgggacgcatgattaccaggcgcctgcgcttgggggaaggagatcggtcgtccggtcggccaagacgatgactggggtgattctgagaaacagtatcacgtgctatttgtggaaggtttccggtccccgccgatgagggaccaacgttatccgggctgctcgaaagacggcggcgacggttaggccgaggggtagatgagctgggtggttgagatgcggcggacaggagctctgacgtttgggaaccgggattgcctaccgaggcgggagctgtattgacgggtaaaggaggatcagggtggtcggaggtgatatagggatgatgcggtgatgaattgtgagccagttcgacagtatctttagatctgcccaatctcctggttctttgaaagaaccaggtgagcagacctcaagcggtggcgggttgtccgataagtaatcgccgggagctccgtcgaggaggggcgatgcagctgtcacaaggtcaaatggacggtcactagctcgagctaatagtcatagatgtagcaaatgatcaaagagctgtagatcttgcgaaatcacgcggttgtgatgttctccgctttgattgggaactggttggggcttatcggtggaagagagaactgccagtctgagaaagcaaagtctgaatattgatgtggaatgtcaagttatcagatgtcaaatgtcggatgttaaatttcgaatggttgaaagtgcagaaaataaaaaagaggattgggtacgcgcggaaaaggtcgacgatctactccgtacatagagcgtaacaccttatgtgctcccttactatatgagtacaggtatagatatatttgtacgacagtaaaacatatgaactaattgaatattcgttgaagtactcatatacaacatatatcatacatctaatctatacctccgcctctaccttcctcgcctattagctgtcatgtttcccatgtttaccccaagagactggagtcactatccttaaaggataccttagatagaagatgggagatggagaaaggttatataggtaagatatttttcgttgaggaaggtgccctgcctatttgggaagggacactcccccattgttgatcgtcatgtggacatatatgatgccttatacagtcagtccagtagctacttcatcaagcaactactgtcaacaagaaaatcggtctatacgcttgagtatcttcgaatgaaaacaagattgcttgctcatagcgagctccccgatctagcgccgtttttcccttagaaagagcgttacgagcaatataccaatatgagatagctatgaaagctcctctaccaatctacctcgagagctatacaggcttaataagcaatacaaagcacctagttaggcacttagactagttagctttggaatcgccgaagtatacgtgtgtggtcagtagaattctacctccatatttccatcaaaatgttctgcaaacaaccaatgtcttctcattcgtccattctttcttattttccgctctcttggcgtacactatatatcgtgttacttttccgcaacgacgttcttccgatcattgatacacagacgtcaatgatacttacattctgctatatatattgccggatgtagggtagttatccatatagacagattactactccattacataattcctgtagtaaaagctgccttggtttctccactgacgccatgatgatgatgccagtcatgcggatatataatcctcttattttgcgctcaatctccaaggtcctcttcatcaccactattcctatacttctacttcctacaaatactattaactaccttccaacttattccacatcttttcatcatgggttgtggttgcggatctaactgcaactgtaccggcggtgcccagagctgctcctgtggcgacaactgtaactgcaagggatgcggagtacgtgatatcctcataaccttggaatgtttcatgttcaaagactaactcagctgtctaatcttagaagtaaattatttccccacgtctccgactccaatgatgaatatggtgatgatttgacgcaaggaatcaaagttcatagagattaaattcgatctctcaaatcaaaaatgtactcccaagtctttttcgtgacatgtagatctcatcgtttctctttcaacactgcctcggaagctttaagcgctcccgtaatactaaaacatataaatggcgacaacgcatacatgatctatagatatagtcagcgaaatatcttttccccgtaaagccacgtaccgtcaacgttttcgcaataaccatcttttccatctcagacgcctgcgccaattccaccaaccccgaaatcaccagcgccgggggaccagcaggcatcagcatcatactaaaccagagcattggatcatcaccaaggagacgagtcctcttagcaagtccataaatcagtgaaatacttagtgccggccagatcaccaaacgaacaacaaagatagtggtgatagccttgatggggatacgggccgaattcccttctgcaaccgtccgctcgaacgtgaccccaagcctacacccaaccatgaagatttgcagcgttgtaaacagcccgccgatgttgctcacacttgcagtcagccacgcggtgaatatcccgccatcatcttcatcattgaagaatgcccggtgcaacgcggggactagacccagcaccgtaccgacaatcatgcagattattgccacgtctgctaatggatactcgaagggtgcgagtagttcttgcttgactcggtgcgggaataatgagcccagccagtgcgtcgacctccgaatcaggttcccagctgatgttcgggcttgttgggcgcgctgcgggagcaatgaggtttcttcggtgagttgctcgtcctgtgctaggatatggtgtcgctcctctgagctactaagaccgtctccacgatcttgtaacatcctcggtccgacgacataggcgatggtcttgctgatcaccccgcaaacaaggaagtaactctgagcacgggagattgccgatgatgtggtttcaccatgtcgtaggatcagttttaaaattcctacactcccaagagagtgaagaagtaacaagggtagagacgtagtgttgttgaacgagcaagccggtgtaacccattgaggtaggccaagcagatatgacgataaatggccgagactaatggatgcagatgtgtagagaactgaccagactagtaatagatggatgcgataggttactgttagttatgctgggttcaacaagagtcgccatgatatacttatgactgggatatagttcatcgctgtctggagatgaagctgctcgccaagattcacgatgagtagtgccggtaggaggagtttcatgcctaatcccaacatgtcattgattgtagtctcctggagcaaatggagccgacgagcagcaaaaccatagcccattgttaacagcacggaaacacaggcttgtagtgcacccaggaagggtgttactaagccttcgctggacatatttgctttttgaatcgctggcgctatcagctaactatgttttcgtcttcaaaaacttataattctaatggccgtggcgtcatggtgaccgagttaactacaaatttaccaaaaccgctcgacattgtatgagcattcgactatcccaaggacatagttccgatatatattatatatatatcatccacactagaaaatattcgggccttcgggggagtctatcaccgagcacggggattccccgtagggtgcttgctatagttaagagacgatagccctaattgggctgcatcttccttctccaaaagcctcaatcacttcaagtggactttaatcacgcgatactttgcagtctatataccatagatacaagcccaataaatataatactaataacacttctccaaattggcccgttcaaacgtgtggggggcctcgggtaatcggtcggaggaaggccgagttgtcctctcagcgcaagaacataaagaacatcgttagaaagaaaggacagtctttctactcttcatctatcacacaaatccttctcggtcttaaacaatgtcttccatcatactccgctcagctttggaaaccacgccagtggcatacggcttctggttaacgtatgtttacaccccgcatttggagaggggcatcaccatcccccgctgctcttctcaacctcaaagctgtatccaacaagaggaaaaggaatcaagctaactggccttctaccacagcctccccagtgccgccgtcgcaaagacaattctccgccgcagtcccgagttctcggaaggtggattcagctgggttctagttgacgctgaacatggattgattaccgacacccactattatgaggtttgtcattcgagtgaattgaactcgagaatttattattgacaatcacatctagctcactaatgccgtcggccacgagggtgctagtcctattatccgtgtgccctggcccgaagagtggatgatcaagcgtgctctcgatgccggcgcccacggagtcatgactcctatgtgtcactctgcagtatgtgtaacccggaccgctgcgttcgcacttttctctttatctgtcggatctgtatctcaaatgctaacacccgcttttctgcgtctaataggaggacgctgccaaggtcgttagctactgcaagtacccgcctgtcggagtccgtggatacgggcctatgtttacgccgcattcatttcccggcgtgaagcccgccgactatgacgacaagacgcacggtgaagtcctcgttattgtgcagattgagtcgcggccgggtgttgagaatgtagaggagattgctaaagtcgagggacttgatgttttgtttattggtgagattggacctttctgtttatggtttgtggaattggctaacgggtttttcctaggacccttcgaccttgctaagcagatgcgtgtcacccgcggtggcgaggagcacgaggctgctatccaacgtgtcttgaatgctgctagagctgcaggaaaaaaggctgctatcttctgtatgtgttctcatttccgatgttccatggctcatgtctaatattgcgttttttaggctccgatggtgatgatgctcttcgccgcacacagcagggctttgatatggtttccattaccaccgatgttgctgtcttcggtgacgggatgctcaacgaattagagaaggctaagggcacttctaaggtccaaggaaagcgggacgggtattgaactgtttcggaattatattgattatgtgtacatataatccacgcaataaattcaactatattatcattctacactgtaaaacgattgctctcctccattacctattattcaaacttccaataaagctttggcttggtcacttctttgtcatcttcactctgtaggcacctggtgtcaccgacttgacagttccattttgctcgacgtcaaaaacgaaaagcgaggtagcaataccaccccaggtcaactggtccagcatagtccagtcgttaagatcgtagaacgaagagaaaagacttgaagaggaaccaactccgggattccgaccctgagttgcagtatatccccggaaagcgatttccccactggcctgttcggagataatagacggcacaagtcgtgacccgacaccaccaaggagtgtagacactagagccgtgatatctgtcccattgctaatccacgaagtgatattcaaaccaggcgcgggctgggtaggtggcacaacagcgagtgtcaatgacgaattcaggtcttcggctttgtatgtgccggcgaacttctgcactgcctctgctgcggcttgctccataagcgccgggagtatagcatcgacaataaggtcgatcgccaagagcgcctcgctgctgcggctggattgcgtgctggctgagaggagagtgaagccggcgtcgaagtccggtatcacgaccacgatgccaccgtagtatcctgagtctccgagtttcgtgtatagatcagtgaccacgcctgatcccgcgtggacgtatcgatggatctcccatggtgagccgaccgagtagcgtaaacttgaggtgtgagtgattggcttcatccattcccgtgtcttttcggatggaaggagggtggaattcaagagggctacaccaagcttggaaagatcattgattgtagagaataatccaccagagggggttgtagcgcctccatcagggatgaactgctcatcaagagcctccgatgtgacggaatgagggcgggtggagttgccaggggttgacgagtaagtggacttcaatcccagaggttcgaagatcgattcactataccattcgtccatggtctttcccgtgagatttgaaatcgcgagaccgaggaagatatagccgccatttgcatactcggggctcgtccagggaaggtaaactgggggccttggggcgtatgccacatcccaagagactggattgcagccctgggtctgttcacccaagcaagatggccataaggatatgtcactcccgttcagcggtgggagaccgtagaagtttggatcagtcaacgcgggattgtgagagtgttcgagatacttgtatagaagaaaggtttgtaggaattcttctgtagcaccatggggtatgccgctcatctgacccgcaagggatttgagggtgactttgtcccattggacatcataaacaagccggaacttgtcatgttgcttccgaacacgctcggccaagaatgggaagatgtcggtaagtggacggtcccagtcccgaggtttcagctctataagtccagcaaggactgtgaagagtttcgacacactggcgaccttgtaaatgctgtttccatccaccttatttaccccaaccggggagtttgctacctcactggcggtgtgatgtaattgaagatctttggctttcgggtcaagcgtggaaaataacccagcagagaatgtgaggttcttcagcgcaaagactccactgcttttgttggcctggttatcggcgaggacggtgttgagttgagaagttaggttcttccaactggcggcgactcgactgtgattgctagacaagtccctaggaggtgggtatgacggtcctagaaggttggcaaaagccgctgccgggaggcaaagcaagccggtgagcacgtaattcggtcgcatggtgcttatgagaaagaattgctgaattattccaaaaagtaggttgatgaattagattgaaatttcaacgaatgctgcacgtcggcctggtcttatacctccttcaaactgccatcgaataaggcgctacgttcattctccatacaaggttatgtcatatttagctccgtgatatactacctgggggccatcaaccaggatctcaatctattggtgcatccatgtcgtggggtacctcgatttggtccgttgtaccgctctgctggggcaatgacacgatgagccgctctagtttgctgcgttgaaccatttctggaagccttgattgatgatccttgaggcggtgtcattgtcaattctatcgatatatgggtgttcttcagcaatacgaaccttcgtgctcagccaaagccactgacatcgcgatgcatagggacactaaacccgatcgggtggcatgcggcgctctatgtcttggcatttatgcttcgatgactacgcggaaaccgacctgttgcaacgtgccgacgcatgtcttgcccaccaaaaagatcacggtcatcacaataaacatccagataggcttggttgagtcgtcatgtacatccccgacccaactgcccatgtggtgcttgcgttgttcagcgccattgttggttgagaagaagcagtcaaaggaccaaaatcgagagttccagtagaattatcatgcgattttctctggtaggagtttaagatggtgtgaagaggttgaaaaagcaagagaatggatgtggcctggatagctttcctatttaggcagtcacgagctgagcacatacttacggcaagtaccggttctttcaaagttccctgcgtatccattatgctaggaacatttttggtgtcttatttcttatcttattgctggtaacttaaagggcgattcgaattataacacgggaccgctctcacgcgcttgcgtttgcccctagttttcgcggtggcaaagatgccggattatccatagagcacatttcagtagcactctcatcaatgataccttcacaggtcgggtcgtcatagcttgttaaaggaatggacttgacgaggcatgggcgttttggatgcacgttagaagatttggtgtagcgtgaattcagtcagattagttattcatttgctatgagactgtcagggccagttgagcgagtagctatgtgggacttggagggaccaattattcagtaatattcagtaaagaagaagggagagatctctaagattggaacatactttggggtgttggaggtcgcctctgcagtctcacaatagctcctttattgattgcatcacataattgtagaagatatcggagaactttcttgttctcatctttctccttgatctataacagatcgagaacagccaacatctattgattaatatcaactctctgaccggcgacatcacatgagagtagaatgcaggctttgaagtgatgttgttttggctcaatacgacgaaagtagcgcgagtgagagtgggcgttcctagagaggacatgtgaagccactatcattatcgaccccggatttgtatgatgtctgtcaagtgtcgattggacgatatgtattagctgctcacatgttgaccgtctatttgagactttgagccatgtcacattatatgacccagtggtcccatgcaggccctactacttactcctttgcctaggctctggtttcaagttatcatatatggccttaatatctagtaacacccaagtgacactatattctaagctttgaatctaagctttgctaagcctttgttgtgctaagaccttgtatgctgcctttgaccgcccctctatacgcccgacatcctttgatcctttcaggtttcatcggtgctccccaaaagcacggtttgaataatggcctcttataggagttgctgttcagactataaaggctgctgttttcgtccgtagacaacgatttctacacaaccttcaaaccctttcgccacaggtcaccactagccatggagccaagaccaaccatcaaattcaagttgaatggagtattgagatctggggctgaaatcgatgacttggaactccaagcttgctatcgcgctctcgacaacctgcggagcttattgtttcaagcaccgatgctggaccttctgagagagcaaatcaaggaaggagaccgctatttcgaatcgctgattcgagcctctcgggggaaattcagagaatgcagaacatttatgaaagtggccggtgtctcggcgacagagttgagaacactctgcaaccgctggcaactctccaaacccctcgaagacatggcacgaaggattgtattcccaacgcacccagagaactatgcgattatgcattccccaggagctcccgtcagaagtgggccagactgtggggtggaggtcatcggggaccacatggcgaaggttcgatttgtggatctcatggtaagcggagagattcccaggtggatgtcggcgcagcgagatgacagttatgaaatggcggagtacttggtcgcgaaacttgagagtgggagcaagtttttctatattatgaacgaattcatggataccgagggtggttgcaggatcaagctgcgggcctttttcccctctgcttcgccatggtcattgatcaatcaacacgccgagcatcttgcggtcgagtttcgaaatcttctccgaatcgtccatgagacccttgaggaacttgaagacagctattgaccctttcccgaccgagacagacatcatcatcgccggacattagtacatatcatggattattccaagtcgtcagttttgtttctcatatagttttctgcaatattagcattattggattgatttccatggttgttccaggtcattatgggggagacgcagtagctcatcgaacttgtaagacgaaccagatccctgttcagtgattcaagtagttctcaaaaaccgcagtaacagccaagcagaaatacttctaacattgtgagaccgataaaaaaagccaccagaagtacagccaagctgaaggatcggctttgcatggccacaattcggtccgcggggaagagaccgaggattggacgattagatcaggggaactccacgacctttgagaatcagactcagttttcaacacctgtaacttgcagtccaaagcgaatgctaggcttgggacgtcctctattgaaagcgcgggcatcattgttggatctgataaccgcaaagaatacgttgacacagccatcaccgcccgccgagctgccaccgcttccagactcgccctcctcaactaccttcacccactctgtgtctacccattccacacagtcttcttccattatgacttcagacgattctgagaaccatggctcgatcttttcggtctccggccctgtcgtcgtggccgagcatatgatcggttgtgccatgtacgagttggtaggcagccccagctccgagatggtggagaaccccagatactgaccgcatagtgtcgtgtcggtcatgacctgcttgttggtgaggttattcgcattgagcaagacaaggccacgattcaggtctacgaggaaacaggtagagctccgcagcccccgtttgatcataccccctcagagagctatgctgaccgatgtcatctttgaataacagccggtttgactgttggagacccggttcaaaggacaggaaagcccctttcagtcgagcttggccccggtctgatggagacgatctacgacggtattcagcgacccctcaaagccatcgcggaccaatcgaagagtatctacattccccgtggtatttcggtcaatgccctggaccgggagcgcaagtgggaattcaagcctactaccttcaaggtcggcgaccacatcactggtggtgacatctggggtagcgtgttcgagaatagtctggtgaacgaccacaagatcctgctgcctcctcgtgcacggggtaccattacccggattgctcctgctggcagctacaccgtcgaagagaagctgctcgaggtggagtttgatggtaaaaagtccgagttcggtatgatgcagacctggcccgtccgtgttccccgcccggttagcgacaggctgtccgccgatgcgcccttcattgtcggccagagagtgttggatgccctcttccccagtgttcagggtggtactgtctgcattcctggtgccttcggttgtggaaagactgttatttcccagagtgtgtccaagttctcgaacagtgatatcatcgtctacgttggctgtggtgagcgtggtaacgagatggccgaagtcttgatggatttccccgaagtacatgcccttcccaaacttactgcgataacatgttactgactgcatttctttcccagctttctattaccgtcgaaggccgcaaggagcctatcatgaagcgtacctgtctgatcgccaacacctccaacatgcccgtcgccgcccgtgaagcctctatctataccggtatcactatcgccgaatacttccgtgatcagggtaaggacgtggctatgatggccgattccagttcccgttgggctgaggctctgcgtgagatctcgggtcgtctgggtgagatgcctgctgatcagggtttccctgcgtacctgggagccaagctcgcctctttctacgagcgtgctggcaagagcagtgctcttggcagtcccgagcgtgtaggcagtgtcagcattgtcggtgctgtcagcccgcccggtggtgatttctccgatcccgtcaccagcagtaccctgggtattgtccaggtgttctggggtctcgacaagaagctggcgcagcgcaagcatttcccttcggtcaatacctccatctcctacagcaagtacaacgcagttttggataagtactacgagaaggaccacccggaattcccccgtctgcgcgatcagattcgtgagcttttggccaagtccgaggaactggaccaggttgtccagctggtcggtaaagcggcactgggtgattcggataagatcacgctggacgtggccagcttgctcaaggatgatttcctccagcagaacggatacagtgactacgatcagttctgccccttgtggaagaccgagtacatgatgaaggcgtttatgggctaccacaacgaggcccaaaaggccattgctcagggtcagaattggaacaaggtccgtgaggctactgctgatatccaaagtgctctgcgcggcatgaagttcgaggttccggaggacgaggcggaggtttcggccaagtacgagaagatcctccagtccatgactgagcgattcgcttcggtctcggacgagtgaaagtgacatcttaacttagcacgtatttccttttagatgtttgttcgagcacattcccctgtagttattgtgtccaactcgagttactttttttccattatggttgcttaacggtataacttctagatgtacatgtggcccgtacgcgtcaggcagcacaagacatgcgcacatgacccaatatcggatctgttaggttatttggcatgttgaaatagtctctttctttaggatatccggcttataacactatatacactattcttcactcgtcagtactttgattgtagcctaggccgacagaccgggacgccactacatcaccgccttcgtgagccaaacaatccctccacttacaccgtgcacctccccggttctacttcattcgacttctctgttgcctcgtttttcttgctttttccatattccttgcctagaagcagttttccgtatcccaaatcgccagccatggcaagccccacgaccggccactcgtgcgcaaacccctgtccctttcctatgcggtctggctaatctccgtgcagcataaatgtcaatgaccccagcttgatttcgctggtgaacaagcttcaagatgtcttttccacagtcggtgtatgtatacttgatcagaggtcacagatcaattgtgattacaggggcaccatgtgcgctaacaccgctactcgttttaggtgcacaacccaatcgatctgccccaaattgccgttgtcgggtcgcaatctagcggaaagagttcggtgctagagaatatcgtcggccgggatttgtatgttgcttgttttggggagcttgcgcggccccgtgcacgccctcggtggcggggcatgcgccatatgtgaataattgctaaccaagttttcgccttgcagcttgcctcgtggctctggaatcgtcactcggagaccccttatcttgcaactgattaacaaaacccccaccacgaacggggagaccaagttggagacaacggacagcgagtccaacgtgaacgagtacggtgaatttctacacctccccggggagaagttcttcgatttcaacaagattcgagatgaaatcgtccgcgaaacggagaccaaggtcggaaagaatgccggaatctcgccctccccaatcaacctgcgcatctactcccccaacgtcttgaccttgaccctcgtcgatctgcctggtttgactaaggtgcccgtcggagaccaaccgaaggatattgagaagcaaatccgtgatatggtcctcaagtatattagcaagcccaacgcaatcatcctagcagtcacctcggccaaccaagatcttgccaactcggatggtctgaagttggcacgtgaggtggacccggagggtcaacgcaccatcggtgtgttgagtaaggtcgatctgatggatgatggtacggatgtagtagatattctcgctggacgaattatccccttgcgcctgggttatgtgccagtggtcaaccgtggccagcgtgacattgagaacaagaaactcattgcttatgccttggagaacgagaagaacttcttcgagaaccacaaggcgtaccggaataaggcttcctactgcggtacgccgtatctggcacgaaaactgaacttggtaggggttgaccccaatcgtctatgaaacctttggactaacggacttcctatttttagattcttatgatgcacatcaagcaaactctgcccgatatcaaggcccgcatttccgcctcccttcagaaatacaccgcagagctagggcaactaggtgactctatgctcggcaacagcgccaacatcatcctgaacatcatcactgagttcagcaacgagtaccgtacagtcttggagggaaataaccaggagttgtccagcatcgagctgtccggtggtgctcgtatttcttttgtgttccatgaactctacgcgaacggtgtcaaggctgtcgatcccttcgactttgtgaaggacattgatatccgaactatcctttacaactcgtccggttcttcacccgcactatttgttggcaccaccgcctttgagttgattgtgaagcagcagatcaggcgactggaagagcccagcttgaaatgtatctctctcgtttacgacgagttggtgcgcatcctgagccagctcttgaccaaacagctgttccgccgctaccccatgctgaaggagaagttccatgctgtcgtcatccaattcttcaagaagtgccttgagcctaccaacaagctggtcaaggacttgatcaacatggaatccacctacgtgaacaccggccaccctgatttcctgaacggacaccgcgccatgactctcgtcaacgagcgtcaggcagccgccaagcctacacaggtcgaccccaagactggcaagcctctcctcccagcccgtgcccagagcccctcgctcgacaccagcggtgaggccaataacaacagtgggttcttcggcagcttctgggcttccaagaacaagaagaagatggccctgatggaggctcctccggcaactcttaaggcttcagctagcttgtctgagcgtgaagccaccgaagttgaggttatcagtaagtggactagctcatgcagaacgcgtgtgatatttgactaacactcacgcagaactcctgatcacttcctacttcaacattgtcaagcgcacaatgatcgacatggtccccaaggcggtcatgtacaccctggtccagtatgtatcatccccaatccctttcgtcgagtatactaacaaatgattttcctaagattctccaaggatgagatgcaacgcgaactactagagcaaatgtaccgcaccaacgagctcgacgaactcctcaaggagagcgattacacgacccgccgacgaaaggaatgccaacagatggtcgagagcctgggtcgcgccagcgaaatcgtcagccaagtccagtgacgaaagagtggacttggtcactagacgatttatccctagaggaaaaaatcatcccattgaccgctacgttggtggagttgggctcctcgcatctctttgtgatttttgcaacacgctccgaatatcttgactatactccgtacttgctttgctgttcctaccatcccttggttagcgacttgttccgttggtccttgtttagatgttgatccgggtggttcgggttcggatttcggattttcgtcttctttggtttcgataagagggagttctttgcttcaccttactacatgttttcttttctttttttcccaatttgagagctctataccgttttcctttctcattgcttggtctgttgtctgcgtttgcggacttcctgccacggacgcccggatgattgtatcaattaatgattctgtctctgctttatgacttagcttagaattcaaatgttgacttttcaatgttttcatcatttacgttatagttcatatcagtacatgcaggggcggtaacttttgagacgtgagaaagctacagtcaacaagaatagtgccaatacgatttggatatccaataatatccgcgcgagcaaatgctagacaacaccggttttttatgtgtgggagatgagaaggtgattatgaagatgatgatgtccttcattctttatttccgcagtttgatgtcgcagaagtgctttaaatacataaaattggaaattctttccagtagatacaaaacaagttgagcaagcctccctagcgaacggcgaccgtgacatggacgttgatgatgtccatggaagcaatgtatgctagaccagtttgtctttcgagatgacgagcttccattcaatgattccatgaccgcctgccaatggtttcttcggggtgtggatgattcttggacatatttccttggtgcctttttcttttgtgggttatggctgtcctgcaagtccacggtggtgaggagtgttgtgggcagagtttgatgtgggggggggggggtttttcttgttttgatctgtgccttgggcttagaattgtcagcattattgtcttgaacggggctgttgtgaaccaaggcttaccatactcatgattctttttcttcgtgacacccgttgcgtgagcatgaaggagggttgaaaatgacagagacaatgccttcgatgtatttgtgaagcctcgaagttgtcagagagtttgtggttggtcatgagtagtttcagaagagcttgatagttggcgctccttgtttcagtgtgccaacccagtctagtgggaagtgatccagtcaagttcaaaagtcgatgtcaattgatgccgtgcgatgaacagttgttgaggctttgtgtctcggaggcgggctctttagtaccgtttcgtggagaatcaatgtggtcttcggtattgggatttgatgtgacccaaaggtggaggtattgagaggctggtggttgtcgagtgctgggaattgactggatgatatgcactgacatctctatactgcaaccttgcgagaccactcttgtcggctttcactacttgatgtcaactcacagtgggcagcatcgatataccagaatcaactcgcagtggacagactgatataccagaatcaactctaagtcccaggtaaattaggaacagtgcaccccctgagcatacaacccaacacgccgcctattggtgctgggaagtatggtgtcagaggatgatgttcctaattcactcgtgagcgtcgagaataatggttcttcagtgctgccacggtcccaagtaccagaaacatggatcccttgatcatacaacccaacacgccgcctattgttgctgagaaatatggtgtcaagaggatgtattccgggctcacttggcggccgtcgaggataatggttcttcatgctgccacagtcccaagtaccagaaacatggatcgattgatcatacaacccagcacaccgcctgttggtgctgagaagtatggtgtcaagaggatatatctctggctcacttggtgactgttgaggaaggtagtgagggaccggcaggaggtggtctgcaacattgcagcaagttgatgggtttccgcattggactgggtggtgggatgaccgtatgagatgggattgagttaagcaggaagttattcaaattatcgaggatctcgtgggttggtggtgactggtgactagaagtgttagcactggcaaaagcgaatcacaagttgggagacaaacagtcatgtcattgcatccctcttcattcaggtggaatcatgagctctgctggctgggctatagtagaattggaagtgtcgaaagactccagtggaatcatcagggaactgtgattttggaagtcagccttgcatctcaagagacgatatttctgatctcaccaaatccctttctcttgcgaagatcaaaagcaaccaattttccatcccttttccttgttccttcattttgtcccgtctgatgcaaatccatttcctccttcttttcccttcttttgtggtttgtttctttccctcttttcttttctttttttttgtagctgctgttgtctgggaatgatgatgatgatgttggttgtttctttttcttttctttctttttcgagctgagcatcaggcaattgccatggggggttccattcggatgcaaacgaggtttctttgcgcagaggtatgtggtcaatgatgaatatatggatgttgcggtggcagtcaggaggcatttgccggtggagaagtggaggcagccctgttcggtggttggcatgttgttgtggctgttcagaagtgcagaaatgtgtggattttatgtaagatgtgatggtcatgcacagtaaatcaatgaagtggcgggcacatgcaacaagttgcgaggaaggcagattgaaaatgagagacgctgttcctgtggcagaaggcaccaatgtgaacttgcgtcagccaatggatcggctggttagatcttccactcatcattgcagagcagaagaaacagagaggtgagaagggttcgaatgctcaatttcttacccggatatttgcaaactgcaatccaggttgctgttcgtgatgggtggtaggctaaaagcagcaacatgtaaatgatatagcgtttgaggcaaagcctgtttcaagctgcaagggtttgttttgattccacatctatcacggttagtaccgagcaaggatggaaacatagtgatatagtgatggaacaatgttgatgaaaggccaagggatgacatggtcaagtcaagatgggttaggggagaggaagaatatactcacaatgcacagcagagatgcaagatcaaaagccacagtgatgaagcccatagggtgttaggtctatgagacaagtaagtgcatgtcagtgattgaaggatggtgacaggtggtaggcagacttaccttagtggacatgatgtgccacgtgagtgtgggtgttgacatgacagatgtgacagtcgcaactggcagtcagatatggtgacggactccatttccaatgaatcttgatgcaagatatgatggaagatgtgatgtggagtggacaagatattttgagacccaagctgatgatggaatgtacttggggtgataaaaccctagatggaagaagggggattgatggaatgaaagatgaggaggatggggagttgaagaagagagaaatagtaaaggaggggggggggggggggggtttnnnnnnnnnnnnnnnnnnnnnnnnnnnnnnnnnnnnnnnnnnnnnnnnnnnnnnnnnnnnnnnnnnnnnnnnnnnnnnnnnnnnnnnnnnnnnnnnnnnnnnnnnnnnnnnnnnnnnnnnnnnnnnnnnnnnnnnnnnnnnnnnnnnnnnnnnnnnnnnnnnnnnnnnnnnnnnnnnnnnnnnnnnnnnnnnnnnnnnnnnnnnnnnagggggggggggggggggggtgttatataggtaggaaatgtgactcgcttaggaaggtactttccctatttgggaagggacaatgggagacaatagaacccgtgggggccttcccaattgcctatggtcatatcaggtgatacccaccagccgctagctgcttcttcatgtggtattcacgacctggtcaggtacatgaaaccgtcttctagtgggcatccttgtagaaggtatgaagaagtgtagctttcaaactagcattcgtgataagccaatgccgatatatagcccagaattgatgctgtaatcataatcttacagtgcaaagtagatttattccgggataagagtagtcgaccgcttatgcggccttgtcatgacattatggtagtcttcttagatcttagtctctttggatggttttttctatatatatcatccccccattcttaaatttttctaattaaacggcggcaaaaagaagggaaagctcaatccacgtagacaactttctagacctttgatctatgaagcctcggggattggagataagctttttgacgccagactgtgttcggaatagcggatccgcccgtcatggcgggtcaccacctgggcaacatccatggaatcatctaatatccttgatgttgcgtcttttttggttggctttctggcttattactggaagtcgcatgggtacaatggtcgggaaaagtaagagaagtaagaaagaatcagaattgaccaagctctactttcgcccggtatgccgataactatagtgccaatcctctttcttcaggtcttgtcgcaccttgtaattcctctctgcagcctcaataggccccatatccaaatcggcaacgacgaatccctcctcagtccccatcttagcaatcgaacccactagagggagcgtaatctgcgataggcccaagaaatcctccgacggcccggcggcgttgacgaagacaataccacaggtattctcaaagcagcgggatgtaatggtcgactcgaggaagagggcttcagaatccgggttatacgcgcgagcttcgggagaggcgtcgtggggggtccctgatagaagtttgagttagatcagtgaggtacaggctaggaaaaattcaacatacagtatgtaggcacaatcacaatttccgccccgtcgacgatcagttcccggaatgcttcggggaatgccagatcccagcagatcatcattcctacgcggccgatcggggtgtcgattgccacatggggctctgaccctgaggaagtgaggtagggtcgttccgggtgccagatattcttcttgcggtaggagccgagcacagtgccatcgtttgagatgaagtatgctgtgttgtagagcagggttgattgatcgggccccgtgtgcttttcgatgattgtacccggtacaatacagatttgcaatttcttggccaggcgttgatagttcgctaggtactcggcggacttgccggcctggactgtccaaaggggatctgtggggaccatgccgctgagatggtatctgattgactcgaatcagccagtgttcatttgttttggggctatccagtgtcgtcagacaggaagtctaataacacatctcttactctggaaggacagctagctcggcgccctgagcagcagcctcactgatgtagttgcatgctgtcgcatgattatactcagggtcaagctcctgcgatactgttagcaaatccgatcgcaattgcatgtcttcaatggttcgaagctcgggtacagcccaagtcgatgcaccgaccttgatatgccattggattacagcaatgcgatgcgtagaggccattttatgtcaattctacaggtacaggaagcgattataatggagagaagaaaaaaaaaacaaactatccatggtcatccactggctaccccaacgagaaattggggtcaatgacctcaacaatcccaccccgccgcgatcaaatcgtctatccaaaaatcaacatatccagtataagaatagtcggtcgcgtatgaagcctccgtccttgacctagctcaatgtattgatctatttgacttaagatgagatcggggacttcgtttgccacgaccttgggctccgaacttggcctggtggtcccattaaccactctccctcagccacatccccatccaatatcggaactaaaacctccccgcttcgttcatcgacagcagcacaaagattctaccccgttcactatttctgcatccagagggataaccggcgcttcgccatctagttcccccttgatcatgccacagcctgacgcagcgccatcttcccagtggcaagaaagcattccgaattactaggccatcctctctgaccgccgaaacactcgcacccacccacccacaacctaagactcgtttaatagaaaaatacgattcctgcggcgtagggagcctatctactcccgataggtgcgccggccgtagcgaaagaagagtcgcgatcttcacgcagcagctgggcgcttccaacgctcaccatatttacgctagacgaagtgccctagatctaccttgttttctaagttttccgggttcactggggcagcagagacggaagaagaaacagctgcctctcccacacgtgaaattcccacatacaatatagctagaaggatgatcattggaaatggtaggaagacatgccggacacactttacggcaatattctctgtacgaccaagggaaataatccttggccagcgagacaatatcggcgagtaaaggaggtacagatacggagtatagtggagtacccgagagacatccctgaaaagtgaacaccttgagaattgatattttcaggacaaaataagtctgtcatacccctgaagttgaagccgagatgagtcaaacagctgcagtcccaaggtaaacaaacttcaaagtccaattcaaaatctgactagatcttgcatactgcttatccgcacttctgatctgtcaatacttcgtagtagggcttagatcttcacggaattttagaatagcctggcaagaatgctagccctaggagattagaagtccgaatctttgtgaaatagatgttatgctgctatcttggcaggaaatcggctatcttccactacgggtttaggaatgacctagatatactcggcctcgggggacatgctttagtacctgcaaaagaccaccccttcaaataaagaatgtcgggccgcgggtgccgcttaatttctctcgtttcaaggatatatatgggcccctcgcatttctttgtattcttgtatctcctatcagcaggtttcggtaagaatgcaagtaagaaggcgtaagacacgtcgatgaatgattggagataacaccttccactgccaagtatagggcggctgtcctacgggagatggagaatgcaggtaccaattagaagggggaaatggactattgatatctcggtagccctaacagcatagggggaatcctgctaggaacggcccacggcatagccggaatgaaaagcgggccgatctagaacatccctttcatattagacgatggtggacaatcgaattgatgacgatggccgagtttcaggtttttccaaggttgggatatatgcgatgccaagaaaaaagcatagccatgatcacatgtcaatgcgccgagacttgcatctattcagggatatgtctatatcgcatatcgtacatgcagcaaggcagtgaatcccgatttttgaatccgtccgagtgaaagcttatcgtgaaatggaggtgggaagaaccttggaatccactggagctctttgtttattttgatatatattcgattgtgatatcatctgtatactattcccaaaacaatccaaggtgtctacatcgccaaatctagaaatacactttgcttcgccacaaaccgacaaagacggacaaaagggatcgacagaccacgttttctgtggcagatgacagtaccataccgtactgtaagattcccgcatgcgtgatttttccatcgcagctattaccatttcctttttctcaattcgaccagttctcttattcttccccattcatctccttcctaccttccctccgctatgcccgcgattacctctacgcaaaatcgtggctcaatgccacgcggctaagagcggcctccccccgtctcttgcacgaaacctctccgctcggtagcgctcgacgggaccacatgtatgtatcgcgaaaagccaaactcgagatgtaaaagctaatgatgcaataggttggaaaaattcccctcctttcgagagcaccccgtctcgacatctccccctttgcggccagtgccagtgctccctgctcggcaacggtctggccgcagtccgttcaatatgttctcggattctctccaccgagcgatagcctacaagaaaaagatcccgattctaaacgaactgcacctcaatttcatctttctccactatgtctacatcatatcctgggttatcatcggctcggtcatcgtttaccccggtggcaacctcgactacatcgatgcccttttccaatccgctggcgctgccacccagagcgggttgaacacggtcaatctgaatgacctccggctttatcaacagatcgtcttatacctaatgacatgtctgtgcacaccgatcttcatccatggcgccgtggtatttgttcggttatactggttcgagaagcgcttccaacatgtggtcagtgacgctcgggcgatgcgacggagccgatcccgcatgggaaccgtgaccgatgatgggcgtacccaggagaataatatcaatcgtgcggagctaggagtcagcggtcgacccatcgtggtggtacgggaccatttaggggatgcccgagacactcgagtaacggacccggctagcaagaaaatcaattcgggcatgaacacaccggaactccggggaagcagtgttgaatccaactccgaagaaacggatacaagcagcgaacctcgttttggcctcgggagcttgaaggtgccaacccatttgaaccccgaacaccacatcgccttcttggaaaagcagcggaaggataaaggagcgttgcgcatcccgagtccccgggagtatgaccgtggtggtgcgcctgaggctttggaagaagacgtggaccatgaggagcaccctcagaatttgagtgaccatgacagccaacatagccccggttcaagctccgagcggctcgatcgactgggtccacttgaagaacagcacatcaccatcaacgaaccagatatttcacgatcccgtggtcgcggtagtacgttccctcgtctggatactcgccctactttgcgggagactaaagatgggaatgaggttaccacccttggcggtgctaacgcgaggaacacattcaggcaggtgttccggtctctgacgcaagagcgtgaccattccacccaaccatatctcagttggaatgcgacagtggctcgtaactccaatttcgtcgatttaacggaggagcagcgtgatgagttgggcggtatcgaataccgtgcactcaagacattggccgtccttcttatcacctactacgtcggctttcatctcatcggcatggttagcatgatcggttggatcatgacagacacccattggggagatatcgtccgggctgatggagttgggcggccgtggtggggaatctttaccgctgcgtcggccttcaacgatttaggtttcaccttgacacctgactcgatgaactctttccaaagagccattttccctctgctcatgctagggtttctaatcatcatcggcaataccgccttcccatgcatgcttcgtttgatgatctgggtgctttccaaattcacccgccagggctctgcgctatgggaagagttgaagttccttctggatcatccccgtcgatgcttcactctattgttcccccgtaacgccacttggtggctgtttggcattctcgtggccttgaacggcattgatctgatcttctttgtcatcctggatgtgagtttgttgtctccttctcttgtgcgacttccactgaccatgctttttagctcaacgattctgccgtcactatgctgccacccggaattcgagtcgtggacggctttttccaggctgctgcgacacgaacagccggttttggaatcatcagccttacagaccttcaccccgccatccaggtttcctatttgatcatgatgtatatctcagtctttcccatcgctatctctatgcgtcgaaccaatgtctacgaagagaagagtttgggtatttacgatgccgcagaggatgatgatgacgaagagacaaatgcccccacatacatcggagctcatttgcgacgccaattgagtttcgacttgtggtatgtctttttgggcctgtttatcatttctattgcggaaggtggaaaattgcagaagaacgaccacgctttccagctgttcactgttttgtttgaagttgtctcggcatacggtactgtgggtttgtcgtttggatacaccggcgtcaatacctccttctcggcgcagttcaatgtagtctccaagttggtgatcattgctatgcaactccgcggtcgccaccgtggcctaccatatgcgctcgaccgcgccgtccttctcccctctgacgctctcaatcgacgtgaggccgcagacggagagcgccgcatgcgccgtcgcgcatccaacttcagtggagttgggtctttcgcccaatcgcaatcgcaatcccagtcgaggaacgatcttggtcattcttcgggtatggacagccacgactggcaaacccagcctactcccaatgcagactctgtgatacatcgtccctcggctgtccatcgttcctcaactgtccaatccgatcggtagaaacgggcgaaaccttcatattcttttgttaacacctattagaggcttggcgttctacatacatatgccctggcggttcaatcttaatttcaatgtacacataattatagaaatattacttcctttgctgatgggataaaacttagccttgtgaccaatataacactgggtaattgtgatgtaatatagaatgtattccgtccgagcagcacattggtttatatgtccttgaaccttgcatggccgtactagtcgatgtagggcgacgaccaagcagactaggccatttatagtgaggtgatccatggatgcacaggcgggaaagatcggcgcttttccattttaggaacagagtaaatatccatgacgacaaactcgatagcttttcgaggatcaccagggtgtaatctaggcagtagagcatagagcccaactcatctccaaatccaactataccaaatcctatatgcagactatatcaatcaacatggacaaccaacagctaccatatctaaacggcgacagcggggccaacccgagcgaccccactctcgagctcaaatccccaatcatcaacagccaaccagacggagccggagacaccccagccaactctcgcccctggtataacccactcggctggtccctgctcgtgaaactcctcgtcagcacagcagccatagtaatcatcctcctggttgcaatcctagtcccctaccaaatagtctcaaaccgctacccaaactacatacccttgaactacaccctcgccgacacctactccggcgcaaacttcttcgagcaattcacctatttcacagacgaagacccgacaaagggcttcgtcgtctacgtcaacaaaacaaccgccggacacctgaacctcacctatgcatccgagacatcggccatcctgcgcgtcgacgcatcaaccccgaacacccgttctggtcggaactccgtccgcatcgagtcgaggaatacatacgactctggcttgtttatcttcgatatcattcatacgcccttcggctgtgcgacctggcctgcgttgtggttgaccgatggctatagctggccgacgaatggcgagatcgatgttcttgaaactaccaatatcggcagtcatgggaatgaggtttcgatccacactacgaaagggtgcaatatggatgtcaagcgcaaacataccggccaggcaatctttaagaattgcgacaattccacgaatgggaattccggctgcgcggtcatcggtgatgagtatacttacggagaggcgatgaacaaccgtggtggaggagtttatgcccttgaactccgcgacgccgggatccgcgcttggttctttccgcgtgtagctgtccctgctgatgtcgctgctgggaatccggatccgagtagctggggcgttgcgctggcggatttcccgagtacgaattgcgatattgcgacgcatttcaagaacttgagtatcattgttaatatcgatctctgtggtgaacttgctgctcagaagcagttttatgagactatgtatcattgtcccgcgacttgttcaagctttgttgcgaataatcctggcgggtttgttgatgcttattgggagtttaatagtttcaaggtttatcgtgcttattgagattagaggatggttgaaggcagggttctttttggcctaattttgctatttgctgggtgacatgattgggttgatcagaagcaaaaggaatgttttgtggcagcatgtctttttggttgtttgataggcttttgctgaaggagtttggtgtcgggatgtaccgtacgagcagataaatgatgacttttctttcgtgctatttgtattttcagtctgaatagcaaagcgctattgcataggagatcgacacaagatcagagatagtcgagacctactgcactcacgatggggcacgcgtagctgaatatcagacacgacatatccgtttgaatgccggatgaaaatagcagtcaatatagccagaaaattgagggatagcatttcatttctgattaaacgaaatcctagatatttgaagctcatgctctcgggtcgtcgctctcatcactgtaacactcctcgccattctcctcatactcattattgtcaatatcgccccaccatccttctccagatacttcgaccgtctcatcgatgcagtgcagtaatttcccagagaggtgtatagcccctccttgccaccagaagttagcgtgaagcggaccaatcagtgccttgaactcttggcagtatggcttgtcctcggcgagatcgaagtactccacgtctgcattgttgacgacgagatttagatcggtgctgatagtgccggaaaaggagtgtcgctctccatcccgggtctggatcaaagcatgtatccttcctttgttgcaggtgagacttcctggagatctatgctcctcgcgtggttggctagcggattctcgattcatcttgggaattgtttggtaatgagcaaggttgggatagaatttggtgttggtcagtccagtggtcttgtgcgttggacgacgaagcgggtggagggatagttctcggcgcgatgtgacaacaagtcagatggtgtgatgactcttctcagaggcttcgctggaaaatgaaagagatgtcagaataatcttggatcgaagtgagaaatgatgagaaatgacttcggaattagtgtcaaataaatgcgaaagatagatattcagtttcacttcattgctaaatcaacataaaatgggtatctctaacaaagatgaatcgtctgtcaaccacaaccggctatcaataattcatctctagatcaaaagacacggaatgcatcaatgctaacgaaattgtactcaacagccagtggcccaagagaccctaggtataccaaaacagaaacccgcaaaaaactcaatcatgatcatcgtaacagtacataagaaaggaaaagaaaacaagatgaatgaaaccactacagctgccgtagcagactgccatctgcaaagggattctctggagacatatccagcaatggccgtgtggcattgcgatcacccgttgcgacaccatgtccggtgcgtggattccaatgactagtagtgctggctgaatgtgccagcaaactgtttgcagtgaactgggcttccgggcttccttcagaagaaatcggggccgcgtatttgtttgagtggtgacggacgctgcgggcagtgttccgccgctgaggtgtggtgtccgcggccggccgtctccaagaagtcgcgggtgggatagcgattcctcccgggggctgatccggaccagtggcagcgtcgatcagttgcatgcctggttggactttcacgccgcgacccttgcccttgcggctatgctgcggtggctcgacaaagactggggttaggtcaaccagaggcttttgcttaagagatggggttcgagtgaaattggatgaatcgggagcacgagtcattgtgttggtccggctgttggggtttgagtcgtggccgggggtatgtgtggatcctccgctcataaagccaacgcctgaaaaggcttcttgcttggctcttttatcgcgatcctcccgttcccgcatagcattttgtcgctgggtgtaggttcggcctaggagtccggatggtgcaaaagcagattctccttcctcgggcgaagagatacctgaaatcaatgcctgtctatcgccgaaaggcccgtccatttcggcgtcgagcatcatagtctgggaatatgaaggtggagggggcacatatccacgaagagtcttcttccgagcaaagtactctttggagcttgtcggcctccgttgatcagagctttcgcgcctcgaagattcagccgaagtctctcgttctaggagtgggacttcgttgtacacatttctgggctcatgcgtcgatttcttcgtcccggcgcgctgcacaagtttctcggtctctgctttctgggctgctcctttcttgttgacaagataccaacttctccacttctgtactgcccggtaccatgtatctgcgatagacttgtcgctggtcgagaaaaagtgcagaaagttttcggtcgacagaaacatggatgatttttgctggctcttgattgcgaaacacagcttcttgggtggcttgatatccttgttcagcgcccgagcgctaggaaagtagatgtcatagtcggatatatggcagatattggtttcctcggtgtcctccttttttgagattgtcacttgtccatcagcacgcagagtaacataacgcttatcccacttgcgacgacgctgggaatggtaaatatggacagtcactggggatggtggcccactggaggcattcccagcatcgagctgagcgagggcttccacgctggaggggggaataacgatgaactggttctctgcatcgtgtgaccaggaattcataacttcccggacatgctcgtagcggcggaggggacgctctaggccaacttgcgagaaagactccatgagaatgaatctgtccgcatcaatgtcccgagataagtgcttagtggcatctagcaataaatcccggacttgagttgacggggtgacagtgagatccgcgacggcatctccatatctgacaacggcatgtcgctctccggcgttgacagcgctgacaggagcatcaactcctggaacgattccggttccgcccaccccgatgtatcttgggggggactcggttctcttgaggtggaccttggatcgggaaagtttgaccttctggaagaaagacttgcgatgctcatcgttcgatgagtgggaactgtgcggggggcgcgccgggacaggttccgatcggggttgttgcgccgagatctcccctccagtcaattgttccatcgcaccttgtcggtgcacctcacgtgcttcctcttcctcctcatcttgctccgccaaagggcgactagttgcggcccgttcattttgtcgtagctcacctcgctgctccagctgagtccgagcgtagcccgggattgcaggaggaggtgcgacatttccacttgactgtggccgatttcgatgatatcgagaacggctcctcgcgatcgaggggttctgctctccgatgctatgcacaggcgccggtggtgcggccatttcgacgtcgccagttgtcgcacctggcattccacgataccgagagaacatttgaggtagggattgcgccgtggctgtcacactattctcactcatgttttggaaatttctcacttgaaattcgcccccgggggccgaggcgcaagagtttcgtaatgtgtttcacgttctatcgccaggataaggttagcgtcgccttaaaccaaatggcaatttcccgtaatttccttcgggtcgaagatcgaacggccagtgctgcgagtgcgattcgggttcctggaagtgtacagaaggtggaaaacacaattgagacaaatgtgggaaaagtccgcaggattcgactcaacacaaccccagtgctcgcgatcaaaccggcctgttctcaatcgaccattcgcgtttcgttaggggggaaaagcgacccgcaccgatcatcaattgggccggcctaggctggtgcatggggttcgctggctcgtaggaatcgatcgttggatcgatcattggatagatcgtatattgattggactcaccgaagtcacttggcatgcagtagttgatcatcgaggagttggagaaaggagaaacatgattgtccagaagttcaggtgggcaggtgggcagatgtcaggtccctgcccggttggtttggccaaacatttccggatccgacgcgccgcgtgcggtttcacgcgctgtcggagtacaatgtacaatatacgttggcctgatggagtatatatctatgatcgacaggtacggaggactattggcattgtattggcactattagattgttcaatggacaatgtgagattattattggatgatatctacggatccacaggacgatcagatctaagtgtctcactccagacgtgcttgctattctcctttctggttttcaacgggacttggcttttctatatttgatcattcttacaggcgaattgaattcggtcgatcttatttcctataagcacccatttcccggcgcctatgggttgttagcatagacatacaaacaaggtataggtacaccccggggagaacttaccaccacgcaatgaagtccactgttcgcacatcaatcccaagctcagtcaatgccttggtagacagatgtgtatcataaggccgtacgacactcgaattgggatcattgccctgcttattggggatcattccgggaatggccacacccatcaccttggccaacttctgacaaatctcatacttggtcatacggtcctcggacgtaaattgcaggatgtgagggaagtccttccgcttctccttctcgcgcaggtacttgatgacaatgtcccgacacacgcgcgccacgtcctcggtgttggttgggtaccgtatgccccagtcgtccattttcacgccggcgttttcatccgtagcctttgttactgcgtcgatgagggtgttgatcgcgctctccgagttattcttggcggtgccgtacagcaccggcacgcgcagcaccacgcccatgcctgaggcactggtctcttctaatacggccacctcgccatcacgcttcaattgcccgtacagattcggtggcttggtctcggcattggcctcgtatggtgcctcgccttcggtgccggggaagacgtagtcggtcgagatgtagatgaggaaggcgccgcgagcttggcattccttagccagtgctcgagtggcatcgacattgaccttgcgggcttgatctgggtgctggtcacataggtccggggacctgtttgcggcgcctgtgagctgtcagtctatgatggggtatcaagtcagccaattaactagcttacaatggatgacaatctgaggcctaggcatagttcaaaggtgattaatgtctataatcaagatctagatggaatacacatacttgacttcatcgaacagcattcggatatcctcctccttctccaggtcggccttcaagatagtaggcggggcagggcgggtgaatccctggccaacaaccaacacgcccgagtgctggaaggtgttgaaaacagaacggccgagcaagccactggctccagtaacaagaacgttagatgtcatttttgttgtagatatgggttaagggaggaagatggggaggatttcctttctgaaaccgcgggaccaactgtgacgtaactaacttctcccagtggatataacagtgaggacataattaagccacctatgtagacaggcaacacatgtggattcactcaattcgatcaattgaatcaattccagtcggttctgtgctttatacacgttaagatatgccatatgatactaggggtgtgtatatgatttcctatttgggctgccgctttaatcagactcaggctctcagagtagacatcagcacgaactcacagagcagtcacgtgcatgatgacttatactatgtaagacgggtgctcattggatgctcgctgattactcagtggcactctgtgtccaatcagtgaacaactctgatcacttagctttaagggaacagccccacaaggtcgtttatactgtgatgtttagttcgtaggtcaaattatttcaagaattttgcgtattttccttctggcaacaaaagagcccactttgtgcaatttatcgcaatgcccgaaaagatgcctcccttttgcaggttggacttcaagtcatttcaagactggaacggtgaccgtccatcacagatcctgatattccacaacaatgactcttcatggtggatcaaagttaccgtggattggtccttgccagaacaagtactaagtctgggttatttggaacgccggtccgtctttcgagaattccttaaagcgattgattttgtctaattgcagcttttggacgatactgtgacaaacattactctaaacttgaccgagcagagtcaaaactcgatcattatacgggatgggtatcaaaacccagcgaactcttcattactgttgcccattgaatgtactgcaagattgcggaagatccaaagagagtcatatacccggcgggaacgatctttaccaacatttgaggctcgctgtttgcatactgttgaggttatagctccaacagtctccatagttgtgttcgagcaacgcctgtttgcttataaaacgattggccgccctatctatgagcctgaaggcacgaaccatgtgttaaacgaaattgatgtccttgcacaacttcgcggacttccgagcatcgcgcagctagttagtctagttgtatcagagaacccatataagacctgcccgtcaaccgctatgccaacagtgatcacaggatttcttcttgaatactattccggagggtcacttgagcaaatttttgaggatgagtttcaatttgatactttgccagtacaatgggccttacaaattgggacagccttcaatacattgcacaaaagagggcgaactcatcttgacatcaagccgtcggatatcgttttggatgccaataaaaatgccgtccttatcgatgtcagcggaaccggtggttacgtgtgggaatggcgttcaacagagatgcaggttctcattcagcaaaacagtgaaacaagtcctgccaacacaccgtttgaggcatgggttgccacggatcgttaggcttatggaagattactttcggctctcgccgaaaaaagtggcacacctgggattggtagaagactgcagtctatcgctgatggtctgaccaaggcggcccccaaatctcgcatcttactatccgacgctctcgcgcaactagatgagaaggcgtagtattcgtccacaagaagcctgaaccctgcgagggtagaaccgtatacatcaactgccatttttttttccatttagccacctaatttcctctatcaactcgaaaaagacacctgatgaccgaagtctgtttctgtttctgttctgttctgttgtgaacctgccatacaggtacaaccagcaccaatctgacatgcccaaggcttattattgaaatatcgccggaggactgctgaggtatcagtcgcgcgggtgttgggggttccaatacggagctggaggctgggaagcaggggagaagggggtctttttgttgtcatcttgaacataaatctactacgaatcaggatactccgtatagaagtcaggatggaatgatacaaacttaggacctgcacgcgactctcttcataaccctaatggggccgagaatatacagccatgatacacctgtccaattttactctgagatcaaaaagcggcaagaggtgagcactaaaacagaaaggggacggtctcgagtgctaggcattatccggtgaatatgcaactatatttactgaatttgtataatattatctatgcaaactaccaattaaacaatatagactgctctaaatattctacaagcattgaatatagaaggccgaaaatccccgagacctgcgagctctcggaggcaaatcggaccatcggagtatctccacttgacattctcaaaattgttcctttttgaaatcctcagccatgtccggtgtcaggaacatcacagccgctttgcggcgggcccgagggccccgtcccagtctttctnnnnnnnnnnnnnnnnnnnnnnnnnnnnnnnnnnnnnnnnnnnnnnnnnnnnnnnnnnnnnnnnnnnnnnnnnnnnnnnnnnnnnnnnnnnnnnnnnnnnnnnnnnnnnnnnnnnnnnnnnnnnnngggtgacagaacccccccccccgcttggcggcgggcccgagtgcctcgtcccagtcttgctattcgcactgtccaatccatcacacctttgactgtgcgcaccttcagcgccagctccactcgctccgattcccgccagatcaagttcaccagcgacgcctaccccaacctcaagcgcgaccctaaattcgctgagatctctgcggaagatgttacatacttcaaggaacttctcggctcccaatcggccgtgatcgatggcgtgaccaccgacgcgaaggacgatatcgaacccttcaacagcgactggatgcgcaagtaccgtggccacacccggcttgttctgaagcccaagaatgcagaggaggtcagcaaggtgctgaaatactgcaacgaccacaaattggctgtcgtgccgcagggtggaaacaccggtcttgtcggtggttcggtgccggtcttcgatgagatcgtcgtcaacacttcccgcatgaatcagatccactctttcgatgctgccaccggtgtgctggtcgccgatgccggtgttatccttgaggctgctgaccagtacctcgccgagcggggatacctcttccctctggacctgggtgccaagggatcctgccagattggtggaaatgtctccaccaatgccggtggcctgcgtctcctccgctacggcagtctgcatggtagcgttctcggcctccaggcggtcctgccggacgggactatcgtggatgcgctgtcgactctacgcaaaaacaacactggctacgatcttaagcagctgtttatcggcgccgagggtaccattggcctcgtgactgctgtctctattcagtgccccccgcgtcccaaggcggttaatgtggcttacttcggtcttgagagcttcgaccaggtccagaaggccttcctcgctgccaagggccagctctcggagattctctctgcgttcgagctgatggacggtggcagccagaaaatggttattgaagctacgggtaacaagcaccctcttgagggtgagtatcctttctactgtctggtggagactagcggttccaacgccgagcacgacatggccaagctggagtcgttcttggagagcgtgatgagcgacggtattgtcgccgacggtgtactagcccaggacgagacccaattccaggccctgtggcgctggcgtgagggtatcaccgaatctctgagtcacttgggcggcacctacaaatacgatgtgtcgatcccattgtcggatctgtacctccttgtggaggattgcaaagcacgtctcacggaaaagggcctggtcggtgatgatgagtctttccctgttcgtgctgttgttggttatggtcacatgggtgactccaacctgcacttgaacgttgccgtgcgacagtacagcaaagaagtggagaaggcgatcgagccgtgggtgtacgagtggattcagaagcgccatggaagtattagtgctgagcatggccttggcgttgccaagcgggagttcattggttacagccagaacgagacgatggtgaagctgatgaagcagctgaagaacctctatgacccggtaagtggagcggcattgatctgtgtgggtaattgctaacatttatttttagaatggtatcatgaacccatacaagtatatttagagctaagtgcaatgttgtataggattggagcataacaaaagtctcggggccgagaagtaataattacattatgcacgagcatgtacgagcatgtccaacgcacaaactcaagtcaaataagtaaatgataatccttccaaggccatattggcaatgttagaggtaaatcccatcagctgagtggaccccttgcatttttaccccagttgctgcctgaggccagccgttgccatgtgatacggagcttgtttagggatggacgctccaccccttgcccgccattcccgatggcttctttactctcgtcttgacctcttggaagtcccaagctattcattcattacttggatgagccctgtcgacattccctgtctgaccggagtagctagctgggctgaattattgcgcgatggacgacatggcaagccactatcaggtgatggaggagctgggaagtgagttgcctaaagctctttttatttgttgcatttccgtcgctaaccgtaatctccgtttgcaggtggtagttttggggttgtttacaaggccattgacaagaccgacggcgagatcgttgccattaaacacgtacgcgctttcatgatcttcgatattcgagtttcaatttgtcacatctcgttcaattgttgaccccttttcagatcgatctcgagtctagcgaagacgatattcaggagatccaacaggagatttccgttctggctacctgcgctagcccctacgttacacaatacaaagccagtttccttaaggggcacaagctatggattgttatggaatacctcgggggtggctcttgcttggatttggtacgttccttgctgctattttatcaggggtttattgctaactcgccccagttaaaacctggatgttttaacgaagcccatgtggccatcgtctgcagagaactccttctgggcttggattacctgcacaacgaaggaaaaattcaccgtgatgtcaaggctgccaatgttctcctttcccagaccggaaaggtgaagctggcagactttggcgtcgccgcacagctagtcaatatcaagtcgcagcgcaatacattcgtcggaactccattctggatggcaccggaggtcatccagcaggctggatacgacttcaaggcggatatctggtccttaggtatcacggcaatcgagatgatcaacggagaacccccgcatgccagcacacaccccatgaaagtgctgttcctgattccgaagaatcccgcccctcgcctcgaaggaaacgactacagcaacacattcaaggacttcattgcacaatgtctgacaaaggacccggatttgcggccgagcgcgaaggagctcctgagacacaagttcatccggaatgcgggcaaggttgagtcacttcaggaactgattcatcgcaagcaggactgggatgctggccgtggtgaatcgagagacgtgaaatactatgccgagtctctcaacaacatgaccaggccggatgatctcgatgaggacgattgggtctttgatacaatcaaggctcctccaatgtggaagcctaagggcacggattggatgacattcgacgaggaggaggaggcaatgcctgatccagcccagatgctcgaggacttgcatataagcgcaccgccgccgcctaggcaccaggctaactctaccgttcgccgagttcctaccgaccggtctccgtctgtcaagcgggctaacaccaagcgtcgctcaagtggtgtcaaacaacctcttggtctagacttaacctacggcaacagcccgtctacggtcagacagttccgccgggtgtcagacaaagtccccactgatctgaacccagccaagcagggctatgatgagaatcaaagcccgaaaacggtgtctaccgatacttcaagcaaggaggctcagattggacgacgtgcctatagcaaggcagtgggaatgtcctgccaagaagtcctgtcaacaacaggagatggtgacaaacgtgaggcaatctccagactcgcagaggcctggagcgacctggaaatggtcgaccccgaaggcctctaccacatcgtcaggatcatgaacgagaagatccaagcagacccccgcctctccactcttctcccacctacacagcccgattccccctcgcggccacgtctcctgttggcccaaaacaacccacacctcaaaagccaccgtcgtcgccaatcctacgtccccgaaccccaatcccagtcgcccccatccatgcccgctcaagctgcacccggtatggaacacactaaacaactctccgacgtcctctaccagcgatggtcagaaggtctccgcaaccgctggggcggcatctaatctcaccctgaatcatcctcacgcaacatcaacctcagcacatcctcttactctttcttccattcgctgtatagtcccgatttggcgttctgacgcatgtacaactctttgccattggctgcatccttggtgtccgttcgttcattctgtttaccgtcgcttactctggtgggactggtcccggagtttctaatgatctggtgtaatatttttgcgctttcttgtgtactttctttgccccgatagaatgctgcttgtgcttctgtctttgtttattgggccttggtcttttgtgaatttttttcctaggtattctcctggattactagaacatacatgtctgaaatgtgacaaatgtcttgattttttcatcgcttcgcattccttcgatgtatctgaagctgtaactaagatcaagcaaacgccattcatactttatccagattcatccggtgtcaactcatccataagtttacggtatagcgtatgcagggcatgcgaatggggctctcctggtatctatggcggtcagccggctgacccgggagttgtggagagatactccgtacatgtggctgtcaactggaactgcgcagaagattgaagacgaatccagcggaatctacgatagcgcggatactggctacttgtatattgaagatgatgatccggataatgaactttggctgaagctctctgaccacatggacacttccatctttcttgtatatcaatgctgtcagtacattccctttggttcgtagcatagaatccgccattactcacgctagcaccagggatagaaacgaatgccaactgggcgatccaggaaggggaataaataacacagcacctacaaaacaactcagtcattcgtaaatccccaacttgacctaattccaccaccacattccgaacttgacttttttattaaaaataaacccaagataagatttaagatacttggatttatacttagctcatagaatctccaacttgatatcgcaacagtctataaaaacagtcatttaatcgatgattcagcaacttcatgaacgccaaggcctgtattttatgcatgagacccatatactgaagaataccagacaatttaaccgaaggaacaaatcggcttcactttaaaatctatggagtcattttccatttgagtcaaggtcccgctggtgaccccaaaccagcgggatcactccaacgccaatgggtcgcgataactgacgaccccaacggcaaactctccggccatagctgcttatgctgttatcgcaaagttactattgccaagcagtgactctaaacggatctgaaatggagtcaactataaaaagtacggcgaatcccaggttccccggaagagcagccagtcccttaccctacaccttgtcatataccttatcatacacacctctcccaagatgcgtccttctttaagcacgtggactcttttcctatcctacctaggatgcagtgtagctgctccggtactacctattctccctcatcatcttgttgcgcgcgacacccccttcaacagcagccttccgaacatcaccattttcgctactggaggcactattgccggctctgcttcctcaaacaccgcgaccacgggatacaccgccggtgcactgggcgttgatatccttatccaagccgtgcctgagctctggaacctctcaaatgtcaaaggtgtccaggtcgctaatgttgattcggggtccatcacccccgagattctcctgaacttgtcatcgctgatccaagaggctctggacgacccatattgccagggagccgtcgtcactcatggaacagatactttggaggaatcggccatcttcctggacctgacgatcaagacggagaagcctgtcgtcgtggtgggcgctatgcggcccgcaacagccatcagcgccgatggacccatgaacttgctggaagccgtcactctagcaggcagccccgatgcacggggccgtgggaccatggttgtgctgaacgaccgtatcgggagcgccttctacatgaccaaaacgcattcaaattccctagacaccttcaaggcagttgaacaaggctacctgggcttcttcctggataccaagccgctgttctactatcctccagtcttgcccaatggccgtgtgtacttcaacgtctcgggggccacggcattgccggaagtggacatcctattcgggcaccaagtactcaacccgaagctggctcgctctgcagtagagagtggagcaaagggtttggtcttggctggtatgggggctgggggctggacaaacgcgggaacaagtgagattgagaacttggtcaagaaatacggtacgcaagtcgtggtttccagcaggacgatggggggctttgtccagacagacggcactggaaatatgtacagtggacaggacttgaacccccagaaggctcgtattatgttgcaacttgctctttacgcaggatatggctctaagcagctcgccacattgttcgggtttgcatcttgagagcatgttcagatctcagcaatagcgggaggctacatagcaattcctagtcattagcgcttaggtatatagtatataaggataaattcatgtataacctgacctctcaccgaaattagagccatatattcgtaattactggctcatccttctcacaatggcactgccaagaattgagctgcaatacgggttggttcgtgccctgctcagtaggatttagccgacagcagagaaccccacggcaaaagatcgttccaatatttggtgtacgcccagatctggtaatgattgaccaatgtggattatctccaactgagcttatcgagaacagcacctccaggtctgggcaagactgggcattgtcagcaattgtcttatctgatgatacccagtggggccgtggaataattcgcgttatctactccatatgttgtacatcttttacgtcacaatttcacctaatcatgatccaattcaatgagccaatgatacaccgggtatgatggagtatcgttgaaaaatcgcagttataccagagggcataggagcattagatgtaaggacataccgacgtttttagatgtttgcctgagatatttgcctggtctgtcctttagatgtatatgaaggcgatcataagtataaactgtagctactccgtcaagtccgtctctatgtctagccgggcaattgaaagaggccgaaataagaaggtgggtccttcccgagaccagtctccacttcaaaccttgtaatatcacggacgggttgctcttctgggccacgactgtaccgcagaggaacagggaattgattccgaaggacagatcggtacgggttcttcgttatggtggaaaaggaggccttaccatctgtcttgaactcggatctgaatggtttgtttgtctagtttatgggaaataggagctagacgaatattatagagctcacggataattgcaagctcctagaagatgtacagagcaggatgttgctatgcatgtcaattttatcataattttaaattaaaggtccatgtaaactaagctaagtaggatggtagtaaaattctgcagtcctgttgcttgaagctgatggactgattatcatttgtgtggttcaccgccaaccattagatcaggatggcatctcgattcatgcattaatcattcaaactgttttctcatccttgtcgttatgtttggccacatcgttacattttgcgtttcgctttggatgggagcgcggtcgttgtttcgattcatgtgccgcgctttgagctttggaggctattgctttatccctttcatccagacgagcacgaagttcagtaaacatccgctctaccccatctaaatgctccgtttcttgagccttccactcggcggattgaattcgatctggtatcgagcagaagttcatttccgcccacccacccaaaaatagtagccaaccgcccgacaatttcctaagaggaaataaccagtccggcttgactttatattcaatacctttggcgtataacaatcggacatagtcgactaattcgcgcttcatctgaagcagtgaatcgaggtcaagcttcgcctcatagatacggagccgaagtggcgtccagataatcttcggcgaggcctgcacaatgataccagacttgagatcggcacgtatgatacgtgggtggccgattggggagcgaatctgaaaaataatggatagaacagagtattcacgatataacccagtaaagcagtcgggatggaactagaagaagatcatcaggggttaataaggatcatccatcgatagaacgagccgaaagatgactaacctcgcaaacagtccacttttcttttttgtgcctagacctctagatctcttgacagttcgtccctcggcagaggtctcgaggacctcccaatctttcgtgttacggataagttgagatatggattgatggggtagacgatctgatcgctttcgttttggccgtgatggaatttgctgtggttgggccatgctcagcggctgctcttctgtgggtatcgcttgcatcacggtattgacaatagggcgatagatggatggtggagagcgaaggtggtttgtgtgggattgggatcgggactggattattgcgagacgcggatcgcgtcacgactttgtgtttcgtaggcctcaacgcgcctgatattcgaatgccaatttagtaggcaattcggtgccactttagccgattaacaaccgggcacctgaactgagactcgagctgagtagaaatatggatatatttctaagaaattatgtttaaaagcgattctccatccaatcactccaatccagggctagattgaataacaaaaaaacaagtgcatcatccgtgaatcgaacacgggcctcgtcgatggcaacgacgaattctaccactagaccaatgatgctgaggcaccaggcggatctgaaagctgattggctggttatagtataatgaatagaaatggaatcaagaccctaaaacccagagtatacatatctatcatgacggtcatcgacacattgacctattggattaggaatgatgaattcagccaatattcacggtcattacagaagcaaaaacctcagaatcaattcatggatggattgattatctctggctacctaatttccgaggtattaacctccagggctacttcgtggcttttgaaaagaagaaagaatatatgatagaagggcatatacaatggtataggattcaaattcgatgatcttagcccggcaaaagcgatttctgaatgttgactatggcattctattccttgtctgatcctttcaacttgtaatccaacaggcctttgattgagttgagtttgactgagtgaagctataagctatgtgaatgtacttatacagagctaaacatggcatacaaatagaacgactagacatgggtgttatcgtcgaacacatcgataccctctttctccgcaggcttcgtcttccgggacatccactcatgacgcaagagccccagagctgttggccggtcttcaggatcccattgtagcgcttttcgcatccactgcacgaagccttccacatcctcgccatcaacattgcgagctatcaggctctccaagcttcggtctggtattggagcttggcccgtccaagtcccttcttcatcccagaacatggagcctagtcgtgtcttgtcgcggaactctggtgcaggagggccaagtagagcaactagctctgcgatgtggacccggtcgtcaaaggctccatctgagtttcgtccgtcaatgagcccctgggaactgatgtagttccatgcctgaataaactatgtaagcgtatttccttttcctcaaaataaagtactcacaacgacagcagtaccccaaatttctgccctgtgatccgatttcgatttcaggacctgttcaggaggcctgcaatgcttctcctcgatacctgacatatcatcgcctgggaaatccagacgcaggggaacaccatcgcccgggagtatcattggggtgagaagctcgtcattgctgggtccagcaacttgtctgttgttggaaacgttaaatgttgcgtttggcattatgcctactctgaggatcagtcagtcatcccagaaacgatggcgagtgaagatacgggcagtaagataacagtctgtgtgcaggaagtccagcatgaccagtaattgttttatagtagacttcgtcgatttgagatccagcttgtctcccgcgtgcatctgtcctgggtctagcgagggtgcctcgtggacaacacaaatatgagggccacgaggacccttgatggaaaagcggtcgctaacttcgtgaagagggcactcgctttgctggtatgttttcggtggattgagccgcccataagacttgagcatatggtccaccacatagatctttaaaacaaccattcttggctccctgttgttaagtgagacttagagcagtatcgttcgggctaaatgagacactcacgtcagatcaacagcataccaaaccgttgccgtgggcccatagccgattttgtgtagaattcggtatctgtcgttcaaggtatcttcatcctcgacgggatatgtgtatgtctcgttgggctcatatcccgttgcaagctcttcctcaattttgacagacgaatccagtagcccaagatcaaacactggaaagactcttgggttggatgtccactgtgatgagcatcggcgcgaccaggcggtttttcgatcaaagggagagatcagttggtacgtggaaatgggaaatggggaagaaattccatatctttgaataagccttgtgttagaccaaacacgcataccactcgctctccagttcatgacgaagatgcggtggttaacgaatgcgcttggttacggagtaggtacggttgaacgacggaggacgtgtcacccctgcatatttccgaggtctatttatatctcgaccggtgttttctttgatcatataaagagggccatcaccgcaagcatagaaaaaaaaaacaattcttagtatgtcgctacggagaataagcctaaacagcattgtctatcaggccccacaaaatttgaagtagcgacgtgccccataggttgaagtcaggctcgatctggcacatgaagctagcaggtgtacactagtctagacataactcaaacctacacgttatcggctacggagatttaaacccctcatgtattccgtgggactcgtcaaatggcaatgagagccacgactccaggaacgtccacgagaaagcccggtttgatatttgttgctgacctacatggacttccacaacacggtaatgttgatgtccctgtggtaggtgaagcagcatgtgctacaggaccctctgcctgtgctgtctcatgtgggctacggagagatggtggtcagagggatggggagaggaagaagagaagagaattggggggggagaggtacccttttataccccaatcatatgggttcgtgggctttctcaacaaactatgcaaacgagaatattactcgcttgtctcgcttgcctcgcttgcccagtatagaaggaacgtttccttctcatctgggcaagtacgatcaccggtccaccgtcccttcctagttcgtcaccgttgggattctcgcctggcttctctttctttccttctctgtgtttagtcgaacaaggtgccttcctggaatggacaccttcccactttcctgatctgtgagtcacttgcaccttccattgaagtacaacaaagcacattgttctttcccaattaagttatagacacggtcaactttgtataggggactcgtctcgtacgagaagacacaacaagcaaaccccgggtaaacaccgcaatgcttcggtcttccaggttccaaggtcagccttgactgttgatatactcctgaaccatgactacaacagcactccgtagtagatctaggcctcggcatacgccaagactccacgaaacggcttaataacacgctaaattaatgcctttaattcccccctgaaacaccgcctcgtgcgggacccgctgtaggctagactcaggagactcggagctattattttctcccttctcaactcccctgctcttcttgttgttcttgctattgttgttctttttttttggtttattctcttatgactttttgaaatatcttgatctctcctactggctggcccacaatggagagcattccaggagcggagagcctccttgacggtccatttccggataaccagaattcaaatccgccacaaccggactctgcttccgagcagttctcccattccagtctctcacgctcatcgtctgtcgcccagaaaagaatatcatcactaccttgtgccaagacggcccgccatgccaaacgcctcaccttgaacttccctatcaatccgaacgaacctgagacatccgatcttatcagctcacccggctctataaccccagttacacagtcttcgactcgtccctcccccgctcagcccccgggaactcctatggcatttgaggtcccggacgatggctatgacttcctgcgggccatcgcctcgcaggaacggaaggtcatggagctccgcgaggagctcactcgagccgaagcagacctagtgacaattaagaagcaatgggcaatgtcggaaaagtctaggaagcgggccgagatcaaccacgcggagccactcatgcccctgcgggcgcctgatttctcaacatccgaggcttcaagttcacatgcccggcaacagagcatgagctcagttacaagctccacggtgtcacaggaacggatgagccgggatctagatcgccgatctagcgtgcgtgctgctgtcgccgccgcaccaggaaccaagattgggagtaatggtcggcgcgtgtttcacggcacacatacacggacgttgtctcttttgtcgccagtctccggtcccagcatgtcttcccggggagaactaggtctctcagatgaacgcgtgggccgtactccgcgatctgcaacattaccatctgtcgagcgcaacaatccagctttgatgaatgcacaactagacgagagccaagtaccggaacatctactcgcacagtggcacaagacccttcctcccccttcacgcgaggccttggtacgcacaggcaagcaaatggcatccgatctccgcgagggtctgtggacattcttggaagatatccgacaagctacggtgggcgaagaaggaatcagtggcacgcaaacaagaagctcaccatccagctcactggcaccgccacatggtcgcaagcgggattcgttggcatcacggagtagagaacggttgatggcggacggcaagctatcacgatcatcatcgtcatcgtcttcgcgggggaggccagcggccgagacaaaaactggtaaagacaccaagccggcggaaatttccacatctttctggaatgaattcggcattgatacacccgctcagaagtctccgagcgctacgcgcaccccctccgacaacaaagccgccaaccgaaacgaggcgaccgacgaacagcgcgatcaccgctcgagtaattcgattgacgcacaggatgaagatctcgacaactgggaaagctgggacacgcccctatccgggcagaagacgcacacgccctcatcgagccgatccacagttgcatccaaacacgaccagtcacctattacacagggtagcagccctcgaaccagcgctaggtaccgttcgaccttttctgatttcatttatgacaacctcgtcatgcgctgacacgttcctagctttggcgatttgaattcgacttctgcacttaatcctagtgtctccgaaagcattccctggcctgcaattaccaagctggctccttccaagcttcaacgtactgcatccaacctgatggcagaatgggagcgctcgctgtcgccttctccggatcgagcttcttcttcttcttcgctcagccgtaaggacagcaagaaggactaacaaagttcctgctttcctttcattgtatatacttgctacctcttcttcggccctatctacggaatcacgtagggctacgaccttcgaattataccatatgagagcgttgcttcttctgttgtcgatatatttcctttcctttgctgcctttttgaagaactctacaggcatcgactgctttcaagattgttgaaatacgttggtttgattacaaatgccatttttgcttctctagcttcacgaatacaacgagtttttatatgtcttctttttgcgtctttcaacgtcaaataatgttttctgttcctctatctatacgtatgatgcgtaccgataacggcgagattttgcgggccggaacatcacgtgccgaactgcgctttagacttttctagttccccgtaaaataaatttgcggttcagttactcgcctccgcaagatctccgcgttctgtatattacttgctcacgcggtttcttctctcgccgaagttcagtggattgatcattcaggccggcttggatccaatctaacaagtgcgatattcagtccaaacctacccgcgtcagccttcaatatggcgtttccaggcaccaaaggcacggcgatcccgatgacctccctgggaggtaactcgggcaccgagggaatgaatgatcaagaacaggctatgatcaagatggttcgtcctcgatcctgacctgtattccgtctaattctaacaaacttcggtatagatgcaacgtggtatggagtcctgcccgatcaaaacagtcatctcgggtaccatgggtttcggtcttggtggtgctttcggtctcttcatggccagtgtaagttggaaattgaatattcgagcactgtttcatatctaacatttacccgcgatagatgtcctacgactcgaccttcacaccccagggccgcgctatcgccgacctcccctggcgcgaacaagtccgccgcggtttcaaggacatgggcgcccgctcctggtcctcggctaagaacttcggtatcgtcggtgcgctctactccggcactgagtgctgcatcgaaggcctccgcgcaaagaacgatcttaccaacagtgttgccgctggttgtgtcaccggtggtattctcggcgcaaaggctggtccccaggctgcggcgttcggttgcgctggctttgcggcgttcagtgcggctattgatgcctacatgagaatgcccggtgatgagtaaacgctcgattcggatccgacgcgaaagcacggccttgtttcgtcgcttggcgcttttgttgccagtcggctttacctggttgcgattttccacctgtacattttacagcatctggcgttctggaatagaacggaagcattgcgggcgttttcggttgttcttgtctattttgttgggaggatggttctccggcctgtctcctttgcgttgcatgtcttgtttgagcctgctttgcatggccttggcatggtggttcacttatattagatccttgcgggtctgactctttactcttttgtacaatactaagcgtggacatacatacaccactggccttttgagactcacctctcacaattgataccaaattatttatgctcatattattcattaattatgaagagcctccatgaaattcctcggcttattcaaatatccgatttgggctaaatctacgccgtccctttcctggcagaccgcatactatgcccgtgccaaatgcaaagctaaggagatccattcaatcactataccacgtcccaatttactactttaaagttacaagacctgacaaaaatacagtttcttcaatttatacacactcctaaggcaacacaatatacttctccaggtgcttaggaatggaaccacgcaggttcttgctctcgagccaggtgctagaaaacaagcgatccgcataccggtaagcaccgtcacagagaatggtcacaacggtgttacccttgcccaacttctccgcgatctccttggcggccaccacgttcatcgctgaactggcaccaaggtacagaccctcctcatccagacagcggtaaaccatctcgatggtcttctcgtcgctgatgctcacggatccatccagcaagccaatatcgggctgcaggttatctgttacacggccttggccgataccctcagtgatactgctaccagaccggtcgatcagggtaccaccgctttgaatgtagctgtggagcacactgcccggaggatcggcgaggaagctcttgacgcgtccgtcactgatggtcttcaaatagcgcgtggtaccagccaaggtacctccggttccagtggcacaggtaaaggcgtcgatcttgccctcggtctgtgcccagatctcgggcccggtagtgtcgatgtgtgcttggcggttggcaatattgtcgaactggttggtccagactgcgttgtccaatgactcggcgtgccgacgcgcctggtggttgtagttttgggggttgtcgaaggctactgcggggactgggtatacctccgctcccagcaggcggagcaagtcaatcttgccttgcgactgggtgttgggcatgtagatcacgagcttgtagcccttggaccggcacacatgcgccagtccaatgccagtatttccggccgttccctcgaccacggtgccacctggttgcagaagtcccttctcctcggcatctttgaccacgaaaagcgctgctcggtccttcacgctacctccggggttttggaattcggcctttccaagaacattgcagccggtctgctcggaaagcttcttcaatcggataagcggggtgtttccaatcgctgtagtataagtcagctaaaagtatatgcaagtgtgcgctcggagctagacataccctcggtcaatccattgacaacgccctgggcggttgatacgcgggtgcagtaggcagtggatccctcaccagcagcacgagccgccgtggtggcaaaccgccggacactttgacgaaacatcctgaattaatgcaatgcaggaataaatggtcccatcgaccctcggggaatgacgagctcccgcacctccgatggtcggcattagtcagctcacgtgcgtctgctacccttatcgggctatcggcctcccgttttgggctgtttgtttaccgccaaggcctccactcctttgatcggtcccgcagtgcggtgcttttcgctttcgaataatcaacgtcaacaacaacaccataatgcctggcagagtcgccgcccgttcgacatctgcgacaacacgcagatcgtcagcacagccctctgcgtctgggcgtgctggctccgttacgccatcgtttgcgatccccgaagaaccaacagagccaacatcatcccccactttgcgtcgcgatgtgtgcttgatctttgcggatgctcagcgctcaactactggacatcgaaagcttgttgtgcgcctgcgcaagcttcaggagttttgctgtggtatctcacaaaagaaaaataagggaaaggacgaagagcccgaggaggcattgattgctggtgaggaaacggaggctgagaaagaattcaatgtggaagttggccgctgtatgcttcggattctcacgattaagaaaagtgagcctgttggagaccgaattgtacgctttttgggtactttcctcggccatgccgcggagaaagataatgagatctttgctgcgggtgaagacgaggagcacaatcccgacacaccgacttcccgcctcacatctagtcttattgcgctgatgaaacctgttatgggcgccaaggataagatggtgcgcttccgcgcaacccaaattaccgcccacattgtgaactctctagaatcgatcgacgacgagctataccatgctataagacagggccttctgagacgcctccgtgataaagaggcctctgtcagggtacaggcggtcctaggcttaggacgtttagcgggtgatgatggagagggcgacgacgacaactctgctctgcttgaaaagctgatcgaaattatgcaaaatgatacaagcgccgacgttcgcaaaaccctcctcacaaatctccctctcgctccagtgacgcttccttatcttcttgagcgcgcccgtgatctggatgcccctaccagacgcgcgttgtactcacgtcttctgcctaccttgggtgacttccgccatttgtccctctcaatgagagaaaagctcctccggtggggtctacgtgatcgtgatgaaagtgtgcgcaaggctacggccaaattgttttacgacagatgggtcgaggattgcgctggtacgaacaatgacccgaatcagggaccgactggccagcgctctgcacccgatatcaacgcgcttcttgaacttttggagagaattgacgttgttaactctggaatggaaagcggcattgcacatgaggcaatgcgcgggttctgggagggccgtgcggactatcgcgaagctgttatctttgacgagcctttctgggagaatctaaccggtgaatctgccttcttgctccggtccttcaatgacttctgtcgcgtggagaacgaaggcaagtacgagagcctagcagaagacaagatgccagaggtcaccgcgatggcctatttcctaggcaaatacatcactaatctcttggagcggaagaagatctccaaagagtctggtgaagcaaacgatgatgacgcagtcgagcacgaatttgttgtggaacaattgcttcatatcgccatcactctagattacagcgacgaggtcggtcgacgaaagatgttttcgctcctgcgagaaactttggccgtgccagaacttccggaagagagcacgaaacttgtcgttgaaacacttcgctgtgtctgcggacctgatgctgcggctgaggccgaattttgcagtgttgttttggaagctattgctgaagttcacgacaccatcaccactgaagatagctttgtttctgctaggtctgaaatcagtgatgacgctagcagacgatccgaaactccgggggttgaagagattgctccctttaataaggaagaagccaaggccaagatcgtccgcgagattgttgttaatatgaagtgtctatatattgcccagtgcatgttgcagaatgtccaaggccacctgcagcagaacatgaacctggttactatgctcaataaccttgtggtgcccgctgtccgcagccacgaagccccaatcagagagcgtggtctcttgtgtttgggcctttgttgtctgcttgacaaggttggtaacttcccttttgatggaaggcgaaattcgctaatattgacttccacagaatttggccgaagaaaacatgaccctcttcattcactgctatagcaagggtcatgaggcattgcaggtcacggctttacaaatcctctgtgatatgatcacgactcacccatctctcctcgctcccgttacacaggctgacggcgagaccgtcacgccgccccccatgcagaagcctttgctcaaggttttcgcccgagctctgcgtgccaactctcccagcagcgttcagtctggagcagccgccgctctctgcaaactgctactgaccaacactttcactccctctggaccgaatatcccacccgcaatccaggaacacaatcagaatgctgttgaatcccttttgctatccctcgtggtctcattctaccacccacgcactcgtgaaaacccagctctaagacagtcattggcttatttcttccctgtatactgtcattctcgtgtggaaaacacgcaacacatgcgccgggtggccgtaccagtgattcgtgccgtgatgaatgccgcggaggagcactactcacttgaggccgaggaagacagtgatggggaaatcgatccgagcgtcggggagcgtgaggtcaaggctctcatggctggtgtcgttggtatgctttccgagtggactgacgagcgccgggtcgttggccttggcggtgaacgagttctggctggcggtgctgcaagctccagtgtttgtggatgggttcaccttgccctagttaaggagattcttgagcgtgttctcggtgtgagcgctgccgcgaatcgctgctcacgcgaggaacggaagctcctattctccctcctcagcaagctttactttgccgctccaacggtgcccgcacgagctagctctcgcgttcccgagggcgatgatcaattccgaactagcgttcgcagtgcgacaggggtcgaaatcgatcctgaaaacattgccctcgcgaccgaggtcaaggagctattagaccaaaccattgaagatggtctcgccgccgaagcctccagccgaaatgctttagtcaaggccaagaacgccatcctcaaaatccttgccgttgcacaagatggtcgcgctgctagtgctcgtcctcgcgaaggcactgaagatcccgagaatgatggagctagtgtacgctctagtagtgttcgtcgctctgtggaccctactggtggctacagccgtcgtcatttctctgttgagccaagcatcatggaggaagacgaggagggtgatagccgtcttacttctgctacggccaatcggcccattgtttccattgaacctagtattatggaagaagatgaagatgaccatgatactagtcgagggacaataatcaaggaagagacgggtgatgagtgatgactgttctgagatttttggttggcgtttgaagttagggatttggggttaagtttctgtacatactttcagtttctgtttttcttcgaatacctttgcatacgattatatgagctatctgagttcctcatgctttgtgcatgttgatgtatatatccacgtgatgtgccacgtgattatgttttgacagcggctgagagacttgacatttggaatgtccatcttgtccaccttgtccttccaaggttgtctatatttgtctcggttctcgctatgtttcactgtatatctatctatacctaggtacggcgtacatctgtcctacctggtaatcgcttttgacctttgtgcattccttatattcgatacatatcctacctaatagttcaggaagtgtccaatcacccaccgtattagccattccctagctcgagacattaatagacatgcatctatatactagtcctacttgactcgtctaaatctgacaaggcgtactaagacagggatctgggcccggttgggttgcacggtcaaaaccagtccgaacacacaatttccaggggaatttgaaggatagcagattcgatgaaagtgagagagagaataaagaagattaatttctgaattcctcaagaaaaacatctatataattcgttttgtaattgtataatctccgtctccccccgtgagccccgaaacttttcattttctcctcaaaactccaccgagttggctcttttcttcttctcccccccccctttcccttctctcctcccccgggctttctcttctattcttaccaccctcttctccggccttgtctttgtcttctgcttttcccgcagagacatcttccccatcttccccccgggattcccttgccgctccgttggcaccggacaagtcagcgatggcggccgtttcagcaccaacccccaagctggatcgatacatcgtcatccacgttgcaaccacctgcgacgaacatggcgtatatgtgaccaaggactcggctgaggtcattgagttaggctggatcttgttggacaccaagacctgcgaggaagtccgttccccccagtgtcttctacccaacatacaacttactcccgagaccatggaagctgacatattttttccccaattgtttagttgcaccgcgaaagtgttctcgtcaaacccgtcaatactccaatcaccccgctttgcagtaagatcgccttgaaaacaaccttggattgcattgggttttgctaggaatccaatttgtggctgacaattctctgaagcgagcttgaccactttgacatgggaacacgttcgctctgcaggcactttccgggacgccatctctcgattcgacgccttcgcccaagaacacctcattagcaaacacctcgagtttgcttttgtgactttggactcgtgggatctgcgggtgcagctgccccgcgaggcccgcgacaaggccgtcgtgcttcccgcatacctgcagcactcccgtactttcgacttgcgaacagaatatcagcgctggcagacgcaccaccccgagtcgcttcctttcggtcccagctcgctctccaacatctgcgctgccctcgaggtcgagcccgttcagtcgtccgccccgattaagcacaaccttcctttccatttgcaagctttggcccccgcttcgccccgccgtgccatggaggaatctgttactctcgcccgtgtgcttcgtggtttgattcgcaagtcgcagccgccccaggaacaccctgagatcctcactcgtcctatggatgctcatgccgacgttcgggcctttttggcggaacggagcaaggtcctgcaccttagtggtctgccccacgataccactcagtctgagttggagagctggttcactcagttcggcggtcgtcccatcgcattctggactctgcggacgccagaccagcacaagcccactggaactggctttgccgtcttctcttcacacgaggaggtgagtttgcatcttggtattcatttggctgttctacgctacagaacttcctgtgttttatccttagtcttgcctactaactgtttactaggctgccgaaagcctgtgcatgaacggccgtgcgctcaatgaaaaggcgattgaggtctctccctcttccagtcgggttctagaccgggccgccgagattctcactcctttcccgccctccaagaaccgtccccgtcctggtgactggacttgcccgtcttgcggcttctctaacttccagcgccgcacagcatgcttccgctgctcgttccccgccatggcggctgcacccgacccaatgaactacggaaactacggctacggtccgccatcaatgatgcctcctcacatgggccacggcggtcacggtatgggtggtggtcactcgcgtggtatgggtggcaacggcggcgttgtccccttccgcgcaggcgactggaagtgtggttctgagggctgtggctatcacaactttgcgaagaacatcaactgtctacgctgcggtgcccctcgctcgggcgctgccgtcgtggcagactcggcattcccgtccccgatggatccaccgtcgcaatttaatatggggcccaactcgatgactagcacccctgcaccagctccgttcgcctcgaccgccggtggattcggtggattcggtcagcagtttggtggcccgcctaacaactacgctctgccctcgggtggcctgggtaacaacacccccggtgcgtaccctcccatgggtcagatgaactcgggctacggctcttccggcacctcgcactccgccgcctcgttcgccaacccggccactcaggctgctttcactggtgcggaccacggtgttccatccaccagtgcttcgaacggtgccttctacggtaccgatggtgctagcgaccctttcgccttcttgtccagtggcctcggtggtctgacagtgtctgacgacccccactctcgtcgcaacggctccggtgccaacaagtcgcccgcttaaatatgggtctagttgtacctatttcatgccccactcacgaactgggcgctcacgcttatgttgtccatattgcaaccctgcattgtggcgggtttctgcgttggttgatattggttgatacgcatttgtataagggattctgcggttttggtgcatcgggttggaaggagcaggcgggttagcgttgtcgaagattttcggatttctttctctctcgccttcgccgcccagtgctttttttgcgtgatgccttgtttatcgttgggtttggtctgttttttgttttttttgtttttgttttcctttttcttcttcttttcccccatatttgtgattttcatcttgcgctatatggttgttttttttatcgagggcccttataggggtgtgtggtgcattgtatttttcgaatgttccggcccatctctggtttattgtctgcaggcatggacacatttgcgttgggtttgccctgcttttggcattgcattttagatattttgtggctccctttctgcactctttggtcatgggaagcgtcggagaattcacggtcttgatctgggtggggatatactgggactccgtttggggtgttggggatttattttgaagcttgggcatcgaatggaggatctcttcggggtcgaagcactgtgaatgcaaaaaaatcattgtgtctatattttcatgtgtattttcatgtgtattctgtttatttgggtctttcgttaggattatataaaattctagcagatcgggtgatatatattgaccagtacagagtacggagtacattataacgtcttagaagtgtactattcgacagattttagtgattcaaggtgaatctgagaccttttctttcatgacaacactgtttaatataaagatgcattctcattacaagattgttggtcaactgctaggtacatggagttactatggtgcgtccatactgaacgaaagtaccgcgagtattagcgctggaggcagccgtaggctttcgcgtccaccgcccggaacccgtcattgctccaacccaattgacctcagctacttgacactccgcgttgcccttattctacctcattgcttcctttgaacttgttgtttacagacctttaatcacctctaatccagtcctccttgattcacaatgtccggatacgaccgagctctttcaggtaagctagctccccacgtccagctccctttgctcctgttcaggacgagagctgtatcatgctaactcatcgcagtattcaggtatgaagccttcaagctacacttcagctccagagtttgttttctaaccctctcccagtcctgatggacacgtcttccaggttgaatatgccatggaggctgtgaagcgaggtaagatcgccgtgatttgcttccctagcagcttcctctgccccattttctgctgtcgctcccattctttccatcaatagacataatttgctgatggtagatgattctaggaacttgcgctgtgggtgtcaaaggcaaggacattgtcgttctcggttgcgaaaagcgttccgccctcaagctccaagatacccgcattactccctccaaaatcgccctggtggataaccacgcctgtctcgcctttgctggactgaacgccgatgcccgaatccttatcgacaaggcccgcttagaagctcagtcccaccgtctgactgtcgaggaccccgccagcatcgagtatattacgaaatatattgctggtgttcagcagagatacacacagagtggtggtgtgcgtccatttggtatcagtacgctggtggttggatttgacaagaacgacaccatcccgcggctgtaccagactgagccgtctggaatctactcagcctggtaggtggtttgccagcctacgtctcgtaatggatgaacgctaatctcttttctcattacaggaaagccaacgccatcggtcgttccagcaagaccgtccgcgaattcctcgagcgcaaccaccaggatgacatggaccgtgagcagacaatccagctgaccatcaagtctctgcttgaggttgtgcagacgggtgccaagaacatcgaggtcgccatcatggcgcccggtaagactattgagatgctgccagatgaccagatcgagtcgtacgtgaagaacatcgagactgagaagcaggaggaagcagccaagaagaagacccggacagggaccaccacggcggctattctcacccggccgggtggcgccgagtcgaccgattaagtgcgaaaggattcagagcctgagaggtgactggatcgttgatttgtttcaatttacagtagcgttgggtcctttccttgacgagaatccaaaatcatgaagtctaaaacacatctccacatgtgcaggtttatttcgtattgtatattgtacaccaaggcagaaaagggtattggtgccaaggaagttttcatctgtcttgaactatcaagaaacagtaccatcaaatcgtcaacatcatgaaattgcgccgtccccgctaattgtcttcccacctccccacccccaatatacacagtttagcccatacggtcggacacatctttgatagtgaagagagagcgctccttgtcgcgcgcaacacgttcgtccttgagcatacttgatctggtcagcatcctgccaattagaagattgtgctcgacataccggttgtccatacgagcgtcctcaccctcaacatgtagtcgcgcctcgggctcgcgtgcctcaatgacaaagtgattatcacagtaagggcagtattcgtcactaaaagcaaattagcctgctgccacttggactttgaaccctttcttgcatacgtctcgtcgaactcagcagcgtttttgcggaaacacttcttgcacttcttgcatgcaaagatctaccccatcaatgtcagcctgatagacctgcgctagccggagaataggggcgtaccatctcgtcgctcttctcgagcgggtgtgactcgctctctcggtggcattcggcgcagtcgaaccattttcggcctagatatcctcagtgaatcctgtgtcatgaaatacgaggtcgatttaagcgtacagcagtgcgagcggatggatacttgagcgttcagaatgtgtttactgcggagcggggtgtattagcaatcggattttggaccagggaaaggaatcacgagcatgagcatgctccaggatatcacgagaagcagacttaccacatggctatgaaatgcgaaagaaaaatgacagcaaagtgctagatgtcgatgctcaagtccaaagagacgcggacagaaagtgatcgccaactcccgtgattccctccactttcctccccgccacccatctcatcaagttttgcctttcacccccttttaaacccctggatatccctcggaattcctggaaatattgacggtcaagcttcatcttctgttcctgggccttttgcgccgcttacgtcgtctccttgctccataccccgagccccacgacatccctgtagcctcagttccgtgcccacgaacatttactctactgcctccgcgccactatttgacacccaacatctacaagtctatgatccattctttcagctggtctcggcgacggatccgtgataatggctatggccggcacagggaaacagccggacaacaatgatgacgctgctcctcccactgtatgcatacgtaactgttttgttgcacacaataaactaacatgaaatacagccacagagaccggtgtcctccttgctgtctcatttcgagaatctttctcaccgcagagctccgtctgctgtagctgccagcccgcgcacctccacaaaccttttactggcaactccggagtctggcgatgacccccgatcctccacccgtgcttcgctcgatttgccccgagaccattccccatggacccctgctgaagataaacccaccccgcttcagcagtcgaatggcgagagactccgggatcgtgggttctccggcagacgatatggccggcccatgtctatgaacttccaccgttcatcgccacagctaccgccgaccttgacagtacattcgcctaaatcgccgccacgcgtacaagatcgcgatgaagtctggacaccgcatggtgacagccgaaagactcggagtccaggccatcgcccgcgagaatcgatgtccgtctcgccggcaccacctcgcccgatctccccgataccgaagttcggtccgtccgttaatgcaggggatacaatgcctagggtgtcgcctgggtctctccgcgccaacctcactgggagcccggcagaccggaaattaaaaagtgcctcgttaccgcccccagccaaccgcgcatcaaagcccaaaatcccggcgaaaccagccatgctttcttacccagagaccagctcgttggctcctcgaccaggacgagcatcacccgatcgaagtgtttcaccttttagcacccctcctggtagcccagagaagcatgtggctgagccgaaatcgtctgggaagagcagtgctaggccagcaccaacattagctcgaccaaggacggagccaccaattcgacgctctttcgatgagcgattacctgctgcgtctccgagcgccagacatgacgctagagagttgggattctcaaggattcctcctggtccagagccctcacgtaactccaagcccttgatggtgcaagttccatctgccccagtagacgctccaactgccactgctacccctctttccgcgcaaagagcccgagccagtgatattccctccgatcgcccagggcttcctcctcgaccttctggggctccccgccgaagtggagtctctcccgtgcgagagtcttctagacatcaaagcactcattcgcagctggcaccggctgttggttctgtgccttctttcccacgtgctagccaatcctccgagccaaaaccaatccagcggcaaccatctataccccgtgagactaaactgtcctcttctcttcccgagcggcgcgtggtgcgtacagacacagaggaagaagagcaaatcgaagagccagctatcttacggaccgactaccccgatgcctcaaaagctaatcgtcgacctccccgctttaaatctggaccgagagatatcctgacaaagtatgatacccgtttgctggctgtgtgcggcaagtacgtgtgcacgactgggtatctgactagggtgtgggatcttacaactggtgatctagtgatgagtctcagccatggcgagactgtgaaaagtttatctcttgcttttaagccaggaaaagatcttgaaagcgagggtgagcgtatctggctcggtaccagtgctggagatattcacgaagtcgatatcccgagccaatccatcgtggccacccgcgcatacccctcccgccgagaagtcatccaaatcttgcgacacaagaaagaaatgtggacgcttgatgacgaaggccgactgcttgtttgggcaccagacgagaccggcacgcctaacttgcaatacagctaccacaccccttccgagcgtgtagcccgaggtcacacgttctccatggtagttgatgacaagctgtggttggcagcagggaaagacgtccatatataccgccctaatgcacgggatgatgtcccattcaaggtcttcaaacgacctctcggtcttcaacactcgggcgatgtgacttccggttcctataccacgcgagatggaggtcgggtatatctgggacacgcagacggcaaggttactgtgtattcctcaaccgattttgtttgtttggcagtggccaacgtcagtgtgtataaaatcaactgccttggatttgtcggagactatctttgggctgcgtataaaactggcatgatttacgtttatgatgtgtccaccaacccttggaccgtgaagaaagactggcgtgcccacgaaagtcccgtatccagcttcgtgttagacatgagcagcgtatggaccatgaaccgcctgcaggtgacctctctcggcactgataattgcattcgcatctgggacggaatgcttgaggacgattggttgggtaagtaaaatattgctctcatccgttgatggcttccactaacacatagtagatgcgcggatggatgccagagacgtggaatactgcaacttccgagaaatcaaggctgttgtcttaacttggaatgcgggagcttctacccctggcagtgtgcgaacgtcggatttcattcgagatgttgttacccccgaagacccgcctgatatcgtggtatttggattccaggagttggttgatcttgaaaataagaagatcacagctagtaagtgtaacaatgtttgtttgacaggaaggcccgctgacaccgcctcagagagcttgctgcttggtagtaaaaagaaagagaacggcgagaaggagcatatgagtcgtcagtatcgagtatggatcgatcatcttactcgtacccttcacgaatgcatgcctctcgaggaatcctacgttctcttgcatactgcaaacatggtgggactgtttacttgcattttcattaaacacaaggaacgccataacatcagaaacatccatgcctccgagattaagcgcggaatgggcggtttacatggaaacaaggtttgtgatattccggtctttgctatggcctttatctaattgcattagggtgcccttgtctttcgcttcatcctggatgacacctcgatgtgctttgtgaactgccatttggcggccggtcaaacccagaccgctaaccgaaacaacgatattgctgcgatcctagaagccgagtctttgcctgcggaaaatagcatgaccctgcgggcagaccagttcgctagcggtggtgatggcaccatgatcatggatcatgaagtgtgtatcctgaacggagatctgaactaccgaatcgactcaattcctcgaaatgtgatcattgacgcagttcgccagaacaacttaccaaaacttctggatcgagatcagctacttgcttctcggcggaagaaccccggtttccgcctgcgcgccttcaccgagtcacgtattaccttcgccccgacctacaagtacgacgtgggtacagacgagtatgactctagtgacaaaaaacgctctcctgcctggtgcgaccgcatcctttaccgtggcctgggccacgtcaagcagcttgattatcggcgccacgaggtccgcgcctccgaccaccggccggtcagtgcaacgtttaaaatccgcgccaagaccgttctaagtaaagaacggaacgcgtcgtgggaaatctgcattgatgaattccaagatgagaaacgccgcttggcttctgaagttagcatcgagtatctcatcactgtccttggcaccgatccccgccaggcccgtgaattgatcctgggaaagcattagccgctcgcatgattgtctctccttatctttctttttcgaagtgaagagcacttctttttaataagcatttgggtggaagcatggtgtatattgtacgactaatgattttacgatagatatgtatcatgacggttgttagagctaaaaaggtttctttatatgagtgtagtattgtaccaggacatactccgtactctttctagcattgatctgcattcaagaagccactctagagacctgatgtgacatacaataatcggagtattttccgaatgcgcatttcctgttattttgattcttttcctgtcgatctttctgcctttccccgtcccctgtcctccgccccctgtactcttcccagttaggaacattgcaagatactaaatgaaatctcaggagaatgtctcaagatgcgttttaccacaggactactccgtatgcagctcgtataacaatgccctttgcaaatcttatagtttagggcttagctatctgaactcttcaatctcatcttgacgtcttcgtagtcctctctccatacccctctatttaccaattgatgcgtgtaagcgatactactgtgatgatcgacactgttatccccggcgaaattaattaaagtgacatgactttgacccttccccgcacaagaccgggttctataaagatccccggatttacaagatctagttaattagcacagcggaacgaaatacaatatacagtcatgctagcgccattcactctcgctgttgcattgcatttgctaccagtagcaaatgccctggttagggaaagtggtgttgtatgttttcttctgtcatgaactaatcacagagatactgactcaaataagggtagattgcctgctctaggatggaattcctggaatgcattcggatgtgatatcaattccaccaaggttctaaccgctgccaatgaggttgttaatcttggactgaaggatctgggttatgagtatatcaacagtatgaaccgagctttgcataaaatgggttgaatcactgaccctttctagtcgatgactgctggagtattcagaacacccgcgataatagcacaaatcgcatcattccagatccatccaagttccccgatggtatctccggtgttgcagagcaagtccatgatttgggactgaaaatcgggatttacagcagttagtatcccctccgtctgtatactgatcagaaatcaagactgatatacgccaggtgctggtgatgagacttgtgctcattatcccgctagtctgggatacgagacagtcgatgcgcagtcttttgctgactggggtattgattgtaagtttttttgtattcccgtgaatctgctttcacctaaatgctaaaactcgtagacctcaaatatgacaactgcggtgtccccagtaattggacggattcataccattactgtgttcctgagggctctggtagccaccctaatggcacctgtcctgatcttagcgatcccgccccagaaggatatgactggaaatcatcgaacacatatgcccggtatactgcaatgcgtaatgctttactcagccttgaccgaacaatcttatattctctttgtgactggggccaggctgacgtcaatacctggggtaatgaaaccggaaattcatggcgcatgtctgacgatatcaacggtaagttgtttgactgatacgcagtggtagatttagaagctgactctgtgttcagcaaattgggcccgtattgcagaaattgccaatgagaatagcttcctgatgaaatatgtcgatttctggggtcatcctgacccggacatgttggaggttggtaatggagctcttactctcgaggaaaatagggcacactttgccctttgggccatcatgaagtcccctttaatcattggcacggcggtatgtggtatctttggatgtcttatgcttatggcaagatatactgacaaccccaaagcttgattctatcagcgatgaccacgtggccattctgaagaacaagtatcttattgacttcaaccaagaccctgttattggcagtcctgcccatccttataagtggggttacaatcccgactggactttcgacgccgtccatccagcagagtattggtctggtacatcctccactttacagggcactttggtgctaatgctgaattccgagaatgtgacttctactcgcactgcgacatggagcgaggttccccagctcaagagccatgatgcatatcatgtcattgatgcttggactagcaaggatctgggctgcgtgaagactgagtatagcacctccttggagagtcatgatgtggctgtgctggtggtcaagagacgatgctagacagagatcatcaaagaacaatggctttgttctgagtggtcagtatttagtatcgcagttattgcggtagacaagcacgaattttgagactcattacccgtgacatatctccaagcatgtaatgcttaggttagagagcataaagagcataaagagcatttttcatggttgttcaggtgaggctcaaagagcttaaggggatattggccacagtgaacatagaaacacaatggccatatttaggaaatctataacaaggatatgaatattatccagtcaatcagaactcattacaggatccgaggctggtcgaagaacaaagaatattggcgtttgatattccgccgagtatttatagtctctttatcggctttcatgattatattggcattgttcaaatagaatcaatatattgtgaaaaagaaaagcccccttgagtatttaagtgcttcgatgtcccggcacaatcctcatttctcatcacacttcacatctacaatcacattctcagtatttactaccaaactcattagactaactaacacattgtattcaggactatcttgcagcaaccatgcctgcccactaccactgcaactctcataccggcctgccccgggtttggctaggttggggtgagctgggtaaccgcaaggctcaactccaagctgaacagaacgagtaagtgacaaaagacacacataaaaaggatatatactaacattttattagatatttcgaagcctatgcccctgacttcaagctgctacacccagaccacccccgactcggctggaatgtgcacttgaatatcattcgcaagtcgacccgttggattgactggcgaatccacaagactggagataagcagaagcttgttcttcctgatttggtacgtcctgagcaggtcgacagccttcttaatttcttttatactggtgactattcggttgacgaagccgacttgaaatattattcagttaggccctgccctggtggctgcgtgacttgccctcagatctgtcagcttttgcgcattcatttgtcaatgtttcagactgctcttcttcttagaattactgacctccaggctattgcctttcgcagattccgtgatcttatggatactgctcctgctttcgttttgcagtatgctgttcactcagtgtatagtagggagcctatccctgacgggagtaataactttcagattactggcttaaagtctgtcaaagactatcgccctgagttggtacttcctgcagtccttaggtactgcgggtattatcgactgaatccccagcagcttacaagacacgggaagagagtgagagtttttggtgagtcggagttcgctgagctccgccgaaaaagccctaagtttgatggagacctggctcggggcttatggctcgacactattgatatcacagtcccgaagattcagttcccgggtaactcagagcccatcaggtctctgcatccctatatgcacactctgctcccgccacaggcggtagaccccaaacggtcaaactatcagtatgttacttacttgcagccattgcccttcaaggattttaatgaccagcgaccttctaacacacctacatggaccccgtcacccgaaaatagttccacttggtcttttgctaccgcaagcacctcctttcaaagcacgcagacacgtccttcgttcaatcagagcattcaggcttcagtacaacagacccctgatcctcaattgactctagagcagacagaggacctgagtttcattgacgaagctctaatcgatactactatggaacaactcaccgcgcaactaccacaggaatatgccacgagtccagccgatttgaataatattgactggacacacacgatggactggagtgcagcggatgtatcagatattgatttcagcacgcttttggatgatgatgctgtggatgagccggatgtgaatgcattggacttgacacaggtaatggactggaccgaagaggacctggctaatgtggacttcacacattttttgaatgatgacactttggatctacagtctttcgacccatcctgcctggaccagcctatggatatggatttagacctatcagacccgagtttctttgatctcccaaacccgaaatccttcgatatgacagcactacctgatatcgacttttccgggctgactccacatgattccatcgacactactttctggactcaatcccagtatatggactcaatcttccctgtgggaatggataagtatgtcactttgcctcaacagattactttgctgccagatccattgaactcagggataaacccggacttgaccgcttcgaacctgaaggccggacagtcgatccagtccgcgttcttttctgtgagagccaacccgcgtacatcggtctcacatcagagtcaagactctactcaatctcggtacaatttgaggaaccgcccgagcatggttgatttagctgaggagctatagatttaaatgatgaactaaggtgagtcattcccaactttgctattgagcagtattaattcttcttcttttgtctgtacttctacgcatatagacctgtcttttcacgtgttctttgaagattgagattatctataagaatcaataagatatataaatcagcatcatcatctagtatatccatagtaataataatatagaaaagaaagagtatcagccggataataagcgacgaagtatgtgacttgattctcattgggcacctcacttttgaagcatatactccgtagataggcataggaatagtcgactgcttattcatctcttttggtctgtctttttggttttcaaacctattcagaccttgctctccagataattgcatcttgctcacttcgaaatgtcaatgagccatcatatgcaagcatgcacgtgctacggcacgctaatacagactaggctaggctgccttacttaatcgacactcccacccgtggatccactttcacgtgccccttgatcaaaaagcggcacgaggtgagcactaaaatggatggaagtgccaggcactaagcgatcataatacatgcaactgcatatttaccatgtgtcactgctgtgttgccattagttacaccaaccatgctaattgtatatctaattaagctgaatgtacggatcttgattatgttgatgccaaggggaacccctggagccctggagtatacttgggatgactaatatcggtacctggggtacctgaagggcttaaaccggaaggtgccattttcggcgatttaccatcaaccttggaattagccctagaggtcatctaggaggtagtagtttatccaatcgagctggcattgcttgcgcagaggaaaatcaattagcatggtgtagtatagtgtcgtactcattgtactcatatacatggacttggtggtatgtatacatcgagtcctgaaaccaggatgtccgcttgcagcctgagtctccccagccctaggttgcagatcttttaataactgtggatacagaaaagaaccaactttgaaccattgctgttctatagatcgtgcacttttgtatgtagtaactgttgtatgttgatatctcatgtaaccatggaaatccacccagtccactacgtcagagcgtctgccctgttatctttctttttccatttgacctgaacattgcctacttcctatcgtctcctgtcttttgtccattcccttctgtatttccttgcccctctatataaatacaatgcaatgaggcggctctattccccgcttcgggattgcgtttccccccgcgatgccagtgtctcaccacggtcgcgggtcttcatctacctcggtatagcagtgacattactgcttctatcatatcagctgattctcgaccgatcaccgaatagaggcataagctggacagccattcaggatatcgtggctggcgatgacgaacgcttcgttctggatgatatacccgctgataaagagttggttctcgccgctatgcaggctagcaatatgtcctgggttgaggagcatctgtcacactggaaggtgaatatctatcgtgcagatgcgaaacacgaagacggtggcttgaccgtcccggtaaataagggcaatgaagctatggtatatctgacgtacgtttttcatacttcgagtcttgttgtcatactaattgccctcggaatcagctatattatcgatcgttactggtcccttcctgaagtatcagtcttcctccacggcggccgctaccaatggcatgtcgataacccgctctacgactccgtcatctccatctcccacctcaacctcgccttcgtccaagaggctggctatgtgaatttgcgctgcgcctggaccgtcggctgtcccaccgaactagagcccgctcgctatctccgagagagaccagaagaccacggacatcccaccgcggtcgagtatcccgatcggtttatggagttgtttccgcgcgcagaagtcccagagattgttgggacaccgtgttgtagtcagtttgctttgtccaagaagaagattcacgagcagagtctggagcactatgttcgtttgcagcggtggttgatggagacgaatttggacgccggcatcagtgggcgtattctggagtattcatggcatagtgggttctccattcgctgatctcttgatctcttgctaatattgactgtttacagtgatctttggaaaaccggctcagtattgtctcgaccaacgcaaatgttattgccagacatacggttattgtaatatgaccgacagcgaaatccagaagcagtgggtatggcgcggtttacagctgccaaaaggatggccaggacagaaccaaaccgcggaatagccacgcatgtatatcgcccgattatgcttgaatgaactgaacatttccattagagacctgacctatgtacccaatcatcatttcatgaagcgcgttcctcgtccgctagacgacctcggaccaaatgtctcaagatactgaccctcctattcagtggaatccatatataataatctcaccgccatatatcctgcttactcgaccgcttgtggtatccctgactactcatgggtcgttcttcctcagccggaacagccaggaacccaccgaacccgttcccgacgagcacgctcttgcgagcatcgccgccccaagaccggtttagctgggcctcgtggaaacttacggggcgcgtccttgagtcgcgacgcccgaacgccgggctagggtcgtaaggtgtgaaattccactcaaactcatccaggcccttgctgtacacattcaggggctgcgaaagaccgccccgcatctgcggcccgccttcacccccgccgaagagtcgtggtggcggcatgagcaacagagtatcggggaaggaggaatcacggacatataaatctcgaagagctggtaaggttcgcgacaccaacgacgaaataagataggtatagtatgaggataccactggtggcattccgtgattatccgtttcggatgtgagttcatagtgcaggagatgcagtgacttcgatgccatgggaggaatctgctccattgggaatgagcgagagacctcctggatgatagaaaggctgtggagtcgcggagcggcagaaagaatgtaatgtagtcgggacggagcaacgccagtagaagataatatcaaagaccccaaattcgcacagttcgctggcatggaaagaaatgcgacaagcccgcttgccgtgacattgggggtatcgcgaagtgtaagagactgaactgccgggaatggtggaaggggtacgttcactgcaaatgcagaatcgtcaagccaaccaagatcttcgagcgtgagatcacgaagatgggggaatgaagcgattccgccgcgcagggtactagcctccatttgaactccagacagctcgagcacctccaaattcatccatagttgagagcccgggagacgtgagaaactgccctccgcaccttggcgataggccatgcggcgcagctcggggcatcgagccatcaactcctgtttcaagggtagacacgatggctcgtcgctatacaaacccaccggcagatcaacaaagcggagattaggaaggacggagatagtgcgggccacgctggctttgttggcctcgcgggtcatgtatggcattcggagtgacaacaccatatttcccagcccctgtgactctcgcactgttcgcataaacaattccagacggacttgcggggcatcgatgggatcgccattgcggtcaaagaaagagcggcgttttcgcttagcggctaattcgatttcgagttcgcagtaatggacggggtcgattcggacgttggtgtaactggcagcagactggtgttagtctctcgcttgacaaaaggcccggggatctcctacagaagcgcccgcgcattcataaaccactgcttgttgacgagggtgcagtgtgccaggtcgcgcatgtcgcatagcatacagccatcgctggcagattcctcggatgtgccatatgtgttatcgacggcgtgcggacaaacaaaggagaaaataagtgccaatactggtcgaggtagctgtttggtgtaatctcgaccaggcacattaacgcggggcgatggtgggtcgggtgtttctcggtcacttcgccgtgagctccgtcgcgagcttcgtcgcagcttatcaaaaaggcccattctggctgggagggtgtgggaggatgtgaaaggtaaagaggggagatgattgggacaaagcgcgttaatgcagggtccgtcaaccatcaaccccccttcagcccccagcccctaacatgaaacacgggtttcatcacgtctaatatagctcgaggatctttgaagatctttcggatgagttgacacgcggcaaaaattatttctcataggtcgaatattatggagacgatttgaggccgcgaatttcatgacatcacggagtcaacagcgtcatttctaggaaatgcctacacaatccatccgatatctatacatggttggccattgactgacatcgatctggacagagactaggagaatatacatttcccttcacactcctcacacccctcaaatcaccatgtctgaaataagtcgcaacttcgtcgatcctcttccctgcccagcacgtaccaacgcaatcccagaatccacccctgtagaacactggaaacacctgccaccatacaaggtgcaatccgaggagcaattcggtcccatcaagtggcgtggaaggtgtttctgtggaaatatcacctatctcttgaagcgagagaaaccactcaatgccaaatactgtcactgccctgtgtgccgagttacccacggagctcctcttcagtgggcggcgatcttccacaagcatgatatgtcattcaccaatggtgcaagcggtttggcgttttattcttctacacatcgaagtcagaaacatatcttgcctaccaaggtgtcttgtgccaattgccggacacctatcatggatgaaggtcggaatatgtgtttgatttttcctcaattgattcagctcgagggatctagccaggagcaaagaaagaagagggaggttttcaagccgacgtatgtgcatttgctactactccaggagtgcatactaatgtcctgctagatgtcatatcttttatgagtcacgcatgctagatcttccggatggtcttcccaaatggagtggaatggcgaatgtcagtgaccggatggacgaccacggtaaccggatcgaagtcggaaagatgattgtataaacaggcgacaaccggatatggacatagaagttgaatatatgtacgatgttcccaaccaagcttgcagtcaccactatgaagccgcgcatacaccatcctgcaccgacaccggatcactgcttgcgctaccccaatcagcagcgccgataaccttaccagcctccgtactatcatccgctcgaatctatcgaaacatcagcattggctccacattgcaaatcaagaaacttacatagtactgtggattgacagagtaccaccaatcatcactccggaatgcagtatccagtgattgactcgccggatcgttccagccggtattgcgagtatcgaagtgagcatgcttcgaccacgacacatacaccttggggtgatcattcccctttacaccgttcggggttttggcatctccggcattgatctcgtcggtcgtaagggtgttttggatatcgccccaggccaggttgtggtacccgctatgcgcagaaagcagggcgcgtgatggtgcccacatgttgtcgctatcccgagagtggatgatcaccactcgttcccagtcactggaacgatgttagagttgggctgaaccacaaggccagaaagggtcacctactagtcatgcccagtgttgatgccagcaaagtttgcgccgtctttctcgtaaaagagattatacacgacgcgaatttcggtctcgttgcattgtcggtatgtatagtaaacgggaaatgcaggtccctcatttcggataccaacgccagggttgcgacaattgcacccgacatctgggtaatcacactgtgccgcggccggtgtcttgtgggcagcatcgtagacatccgatgtatccggtgagccgctgtacgcccaggttggatagcagggtggctggttctgggcttgcccaaagaaccagatgggcgcgtagcggtctgctagatctaaaccaccggcatcgaggagggagctcatctcatcatttgttatctgtgtgagagctgccactgccacatggctgacggccaggactgccaagctagctcctagcttgaactgcatggttggacttgggggaatgttatgggatacaggggtcgcgatttgaattgtccagtatatctctctcttaaatacatactcttggagacagcatagccaggaatatccaagacaattccagagaccattttccaaatggggtgatgagttgctaagggttacatcgcgacatgcgggtctgcatttatattagccccggaggtaccccgagatatcccgcacgtgtgtgcagtagattatctcagtcgctaattattagttatctggcttggattacggagtatcactatagcaccttagaatatacacaacttaagcaacttagagaccgtcgatgtgtatggaattcctcaaacagcggtgaagatggccaggtagatttcaatgggggctacagacggattggggagaaagcagggtagaatatatatatcttagtcgctcagatgatgacttcgtattgcaggcttatgaccctcttcagaagatatcacttcaggacttctcgtttaccaagtacatgcagaagcaatcccccaaaaaacctacaatggtggttgcacgaaaggatgtattgatgatctcctttcctctggccaacagatcattatctcaaacgatgtccgaaataaccagctagcatcatatttattcgttcctagctagtgttattattcatacatctcttcggtagctttaatgcaacaaaaacatcaatagcttatatcaggtgacttctattttgacagatcatgtgatcgatctctggtagatcaataagcttccctagggcgccgtcatttgtcggagaatacacccaaggagtcggacagcatccctgccactagaccttacaccaaatcaggctatatccacactatgtggaggtaaccagcgtctcgaggtctgtttcgactgatatctagaccctcgcccgtcaaatttccatcttgcactgatctagctaccatttgttatggcccttcgaacgcagcttttctggacacagttacgttaccgtggagaatcctaatagaggtctactggatggatgatctcgttgggagaaaagacaagagtagattctgttgtgctgatgatggacagagaggagaggaagagagacaaaggacggaactagctggtctatctaatagtgggtgaccgccttgccggccacccaaaacatccacatctaggtgccggaatgttaactggcttccctttcggcaaatgacgcacgagggcgcctttaaaacggaaattccctatgccttaggctcgactaacacatgtccaactgctgttcacatggaacctttccccacttcagtcatcaaagttctcatttgagtatttgctactaccaccaagatctgcactaggggccgttcgacccgggatcactcccaaggcttcgtcacggatccccacgcctgcctactcgtcagggcatcgtttctaccctgacggcgaggtatgggtctagaattttgacaaagttcggcgacaaagtcatcgttgacccgaagcaattggcaaggcttttcaaaaaagtaacaccaggggccgacttctgcccacgcgaacacacatgatgaagaatatcaatgtcggattgacgtgggcgaagatgtcaaggacaagcccgatcactataacgtctaccttcaagtcaatacccaggcagaaagcgttactagtgagccatttttggtaagtagaactggcgatacggaatgacccgaacacgaggttaaggtgccggaatacacacaagaggtgttagttcatttagacagcccgacggtgcggaatccgctaaggagtgtgtaacaactcacgggccgaatgaactagccctgaaaatggatggcgcttaagcgtgttaaccgaacgcgaggttaaggtgccggaatacacgctcatcagacaccacaaaaggtgttagttcatctagacagcccgacggtggccatggaagtcggaatccgctaaggagtgtgtaacaactcacgggccgaatgaactagccctgaaaatggatggcgcttaagcgcgttacatgctttcgaattctgagcggatattagcaggaatcttttgtcaaccggtatgagcacagatttactcacttccgttcggatggcggaatttaaaaggaaggagctagacatccctgagcactcttgcttatttaatgagtctaggcgactgcctatttggcccgtatctcggttcttcagacctccaaagccatttcaaggcgcttgtgagctgaaaggtgattggccttgaggtaatttcctcttcgcgcattcgtaagaaatctgccagtctattctcacgccagtcgacattctctggcgccgaattagcgccgaattattcgtcacgcgctctgggaatcggtcaagaacacaagcaatcaagcaatatctgcattcgcaaataccccttcgtcctcgaggactagcgagtcaggttcgatagcttcagaaatatctacgtattcgttccagagcatttggtggacttgttcattttctgtgtcgtgtttcgtacatatctacatgccctcagaactgttcatgctttgtagccggcagcatagcggcggagagagcccgggcgtaatggagaataggattaatatgtatctgtgtaggccgggcgcgtactgccagtcccgtctggttcgagtatagtagggggttttgactatgtaaaagtagaattcaaaagtggagaattaagtctagcaaaattgaattgatgccttctaccgcgtttccggtttcttggtcttcccttgctattctagtgccacgctgaattaatcccgttgatctgaagcttgacgttctgggtcactccatccgtcgagacaagtcgcgcttcagttgcatcttccttagggaatatctgagccgtcaaagagacctctccttgacccccaaatacctcaacactagaccaatccacgaagatctgcaggttgatacgtttatccgcgcctgctgacagtgatgtgtgatacaaggttgcaaaagtgtcgtcaaaagatgcatctcctgaatttcgccgatccacgaagacctccttgctggtaaagttgtagccgatcagtgtttcttgcttaaagtcagagctagcacggacagcgatcgcaaacgtagatgcaagagattttttggagtcatgatcggaaaagctcaagtcgatcttgaatgccttgccgggggagttcagtttggttgatcctttcgatacggatttccaggaatgttgcaaggtctggtggttggcaacactctgccagttctgttgcggttgttgaacgagggtcaccttcccattgatcgtctgcaatgacaactgacggggaacagacatggcgcttcgccaagggcttgtcgggatctccgtgccatactgccaattattcatccacgcaatctggaccacatctccattaggaagtccgttataactggcagcagcataaaagtccggaccccaatccatccagttggcagaactgtttcctggatagatgctagcaggatcagcctggaaagttgttccgtcgaagtcgccgatgaagtattgtgttcctgatccgaccgtgccaggtggtccaccaggattgagcccaagaacaattacccatttcttgattgatttctttcctttgacgggcagttgaatcaaactgggacattcccatacgccgccgacagagttgtagggtccgaactcgctggccaaggaccactctttgaggttgtcagaactccatatcagcagcttgtggagtgatgccagagttgtgacggctatccatttctgtgtatcgccatgccagaatacgaaggggtcccggaagttttcgaattctgcttcatatggagagggtggattatgaatcacaggattctcggcatcgtatgttgtccacgtctctccctcgtcgagactataggcgattgactgggattgctgccctgcggtaatagattttccgcttggtaggtcttgagacacgggatactttatgaatcttgtcagtctccatcagtgatcaagtaaaatagccacgcgtaccgaagaagtatacatggcgaccaaaggaatctttccatccactccgaagccactcgtattgttcacatctgctaccgcacttcctgagaagaacatctcggtgacctcgttgggatatccgcgagcaagtagagcaatcgggtgctcttcccagtgggtcaaatcgctactcgttgcatgaccccacgacatattcccccattcaacaccagccgggttatattgaaagaaaagatggtaagtgccatcgtgatatagtagtccgttaggatcgttcatccaattttcggcaggggagaaatggtattgaggacggtatggttcggtatagtccaggccggacgctgtcccgagcagacccagggccaatgcgagtaatatgcccattttggaattggaggaaagccgctatgcaaaataaacctattctgttctatcaggaggaaattcctacaaaatttatacatctgcgaaaatcgaaaatccctcatcccccacattccatacttcttggcataccccgtggggattccactgccctgcagatctcggggaaatacaaactctcaccccacattcttggaagagaacacttaaacaattggcacgcccggagttaactcgctgaaactcggaagtaatttcggagctgagacatctgctgtcttaatcgggtagtgttttcgcccgcatatacatatcgtggaggtatgtgcgggtgaattatgatgtgatcgaagttgctttacaaatgaagtatgagcaaatgagcgatttatatcattagggtttgccaagtcggctaaatccttgatgttaacttgacgatggttacttggcgtgatgcgattccaaggcacaccggaaataacttgcgccacaatattcttagtctaataaactcggtgagagaaagcgagaagagagatcaagaactgtctattggtatattggactaattgtctcgggagaaaaaagaggaaaggaaacatcttcatctaattgaattgctgagcaagtttgaagtgtagtccctcactcatagtacggcttcgcatttatgagcttgtaggcaacctccttgtcgtgaccgaaaatcaacgtcgcgttgtacagtctttgcagtctgcggatcatgttgagactgcggaaccacgcattgtgatctctagctaatccgccatggggatgacccagcgtatagttctctgcaacgtggaactggtccgaggtccaaataaatggtccatcattgaccaggttgacttgcataatgcagagcccaggtgtatggccaggtgaatggtggagggttatgccctggaaaaggtcaagttgcgactcggtgaaggtgttccactttagctcttctagtagcatatagtgtgaaagatagacgcccaagtccgctccggttgctatcgcccagcaagcgtgcttgaactcttcttcgtggacatagattgggacatctgtgttcacgaaatgctcaagtccgccggcatgatcaaggtgcagatggccaatgatgaccgctttcacatctttgatgtcatttccagtggctttgatagcattcgggagtttattgttctccgagtattcaactcgcggaaagacatccgtgacgggcgctggccatttctgtattttgtttagttatacataatgacgattgcgatacgatccgacaaaccacttctagatcctcagcacagccggtctcatagagaatgaggccaacgcccgggtactcaataagagccgaaataagcactaaatctcggcgtttattcaccggattaaggttgctcagggtgcttgaattgccacctcggaaaatcctgtgcaagttagtaagaaaatcatgactttagcttccattggcaaacacaaaccatgattcatctgcttgaagggcgcccaagttcagaatgtgcatttttgtcccagcaggacacttgaatgctgggactgctgcagataccagctgagaggcagggtcaacggaggaattcatatttcaatttgaatagttgaacaatttgaaatgaaaaaagaaatatggaggaaattaaaaagtcatgcccaatatgccggcagatctgatgaagtcataaccgtagtcttcccccgcatagaccttggtatagcggccgaggagcagacccaccagatgcccagaagggaattgacaaatggaattgacgaataagaaggcaggatgggtcaagaatattgacttggcatttctgatttagttacctcggcaatggtaaaagccctttcaataggaaggtatcttagttccctgttgtatatggcttcttaaaggcagtctgccaactctgccacgttttcgacatatacaatctttagctatgaaagtcaaccctaactagataacatgtaacggatctacgatcttcatctatctttaacatcggtatcccagctgaccgaggtacggagtataagagctctaataccgctgccttccgctatcctggcactgtttctgtgtgcatatagaagaaattagccgtagaatctcatcgttttaaattataccactcatggctgcgcgtctatcgcttaaaaattcaccgttcctggactgaccgatctcgtgacatctcacgagctgtacgcctgcaatatttgccacccttcgatgcagatgcttagtatttagatagccaggctgccaatgaaaaccgtactataataggaaatgtccgctgttctgaaaacaaagatcagacaatcagggccctacttacatatctgccggactgccacgtcttgacgtacaccatttgcagcaggaagaacaaccaccgagcacaatcttaatgtctttctcgtgataatagtacttcatgatacatgcaacgaagataaataagctccgaattttcgtagcatatggagtctatttgctctccgttggtcacgtgtcgtggggtagagggcgaagttgggcagctagcatcaacctctaaccttcgggtggttgcgtctcttcttgttcactacaatttggtacagccaccaaaggcataaataacactattgctctgttggaaacgcgctcgtcccctgatcaagtcctcaagtagtagatatctcccgaaagaagtttatcctggaagattttgaaccccaaatggtcgttttcaaatcctgcagtccagacatcttcaggaattcgacctcgcttgtgcttggctgggagctgatgtcccttgataatacacgagtcaaaatcgatgatcacggcttcttggcttgcaatcatgatgtttctcatgtggatgtcattatggattagattgagagcatggaggtgatcgagtcccgccttgatctgctggagacagcttttgttattgactgagcgcccagcctcaaggcagccggcaagcgtctccacatatctctggaaacaaagcccggtaatccgcccccctttcaccacacatccaagatagcgagcaatatttcggtgttcattttgcatcaggacctggcagatacgagcttcctgaagcaggagcacactcaaaaattccgaaccatcatagtcaaggagctggggctgtttgatgtaaacatctgggttatcggcatcgtggcatatcgaaagaccatcttctagcagaggccaaatgtgttcggcaggaatctccttgagacagctttcggcctcaggcagaatctcatctgggtgagcgaactttccaggcagctgagctgcaaagtacttgtcgccatcctggaagatgacattagtgtaccgaagctttgggctgccgccgagctcccagatctctgccatatcacgataatgcattgcggaaagggggaattctggcaaatttgaatcgaaatagatgtgcgaataatagaataggagattgcgagcccgccctatataagagacctaagtcgggcaaccgcatacgcacgaacctcctgtcataccgtaaagtgtagcggtgagatgactgcatcgaacatacaggaggatttgctttttagatgcagagaccataatgaatagcactcatatttggaatatatcccagcatggtggccccttttgggtgtggtctgagcgtccacggatccacggtagagtaaatgctgactaatattaatcggagaggactgatatatcacgtgactggatctgagcactctcattaaagcggcagctgcaataggaaagccctttgtatagtaacctagatacgtcttaatgaggttccaataataaagtatggagtataaagtgtgggaaattccctaatactattaaaagacaaatctcgatacatgttgcccaagatgttgctacactgtatagctctaggtgggacggacacaagactgagaacaagggcttgcacctgttcgaagatgagcagtagtggaatatatattgccaaattgcaggagaagtgaagttatccccaacctttaaaatgtatgttcatagatgtacggagtaccgagttagatccaatgacatcagagaacccacccaatcgcactcttattttcttcccctctatatcctccctcttagcaacatcacatctccatttcagctcatataacatgtcttggtcacagaagacttttactctccctactcgcagccgcggctcctacctgatcaccgaccatgtcctccaggaggtccccgagatccgcgactacaaagtcggcatgctgaatctgttcgtacagcacaccagctgtgcgctttcgctgaacgagaactgggatgacgatgttcgcgccgatatgagcgatgccttggatcgcattgcgcctatggataagaagggggatttgtatcgccattctgccgagggcgccgatgatatgccggtatgtgtttggagatagcaggggattgggcattgattagatcgctatgctcgcttcaggagtctagagtcctctgattatcctccgctgttattttcactctcttcgaatccagcactaattcaacacaggctcacatcaaatctgcgctcattggcgcttcggtcaatattcctatcacaaacggtcgcttggcaacaggaacatggcaaggcatttggtacctagagttccggacgagtcgacacagtcgcaaggttgtcgcgacgatccagggacagaaggcttgactggatggggctgagcgagggcaattgtgatttatctggtttatctgatgccccagctacgagtgatgcaagacgagttgcaagaaaaaaaaataaaggtttgggttggcgagatagtcgacatatgacccggattatacgagatcatcatatggtagtcgatgtaatacacacatttttggggacaataccatcatcacacacgatcgaagagcagcagatccattcatggatattctgtacacggcctcaggcccaaaaccaattgaaaaacgcaaattgtgcaacgccgataaagaaatctcatgctagccgtctatcgctgctccaagccaccctctgtcacacgctgagactcgttcacctcggcagcgtcaccggtaggttcgaggggatagctggtggcaggcagggacttcaggtaagcgcggtgctgttcatgagcctagagaggtgttagcaaagatccaatcgtagccggaaagaccgcggatatcagtggacatacgaaggggacaccgcagtatgtgcaggtagcgatctcgggcttgtcggtgttgatgaaaatcttagggtgaccgagagggccaccgccaccgtcacagctgacaaccctggactttgtccagcggacgggctgtctgtgaatgagctcgatagcagcatatggtcgcggctaaagagtagcatgttagtatcagtccttgaggcattgccaacagcaattgcatgagcactgctgttttcaacgaattcgcacctgggactccatgattgtctgctcaaagcgaggtccaaccatggctttctcgcgcggctgctggctggaggcccaggtggtagcgcggttcggagcctgcatgctccggatgcgctcgccaacctcgggggcctcctggagagtaccatcgttagtgggctcggcattggtcgcggagacattcggcgtgggcttccgcggggtcgggtcgttgacttggatagggttctcgctcagacggggcacggtcgaggagtatgcgcggacaacgaagcgtgggcgggccgacgcaaaggtcgcaattctgcggccacaggacatcattatgggcaagtttccccgggatggttggttatgacggaggataagaagagggttggcaagggaccaggtgcaagtcggcactgaataatccgcgaggtgtggtttggtgggtggtcaccgcttgctggttcgagatagctccacccagaacttggattttctgccgcgtcattttattttgcgtttcgcaagtgaagtggctcgacatctttctttctcctgatttttaaattggggtttgtatccattaagatcatcctttcaacccatcatggctggctcttcctccccggctggaaagcctgagaagaccatgtcgtcaactctattgaccatgaaggtatgaatgacagtttcttggttaacagccatacaactaacactatatcccagttcatgcgacgcgctgcagctgccaaagaaactcaaagcccatcttcggatgctagcccgcacaactccaagcgcccccgtctctccaccgaggctgagagcccttccacctcagatatggatgcgatcgcggctgcacttgctgccgaagaagaaaagcggcaaaaggccgtcgcacgagcagccgcagaggccggcgagacacactgggttttggactttcctgctacaccccagtccactcagcagcctatggtattggcggcagattcgctggatgcagatgatgatacccattccggtggtcggcgtgcatatggcaatttcaagcgcaaagagcgcaaagagcgcaaggtcagtattctatatcttgcacttgatattttgtactcattttttcttagcccgaggacgatgaagatgaagacaccatagtcaacccgtcgaatccagaagaggttgccaaaatgcaggaaaaatctagactcaaggcagaagccaaagcaggaaaaacacgacagacgaaactgtctgaactcactagtatatctggctctggccgagcgtctttgttgggagccccctcctctgacaagaaaaagaagaagcgcaagagctactaaacggatgattttcacgatcccacctcggatgttttgattggcgttttagcatagcatttatggcgttttggggttatatcaatcagttccttctcagtatcacctcctggtggtatatgcttagcaatcaccatgatcgttggcctactaggtatgtacttctttgtgtccaccatacgacaagtaaatcaatatctataagcgacgtagtcagaagttcttacttacaaccgtgtttactctcctatggaagatattgaatcatgtaccgggatattatcatcaagtattattcatcctcttcttataaaccaggtcaacatctatactctcggtcatcgagaatttcggactttgtacggcgatactgacgggagctcgaaggatatttggtgggacttgaaacacagcacaggatgaatgtgagcttacatggatatcgtaataagaaattagtagggccgtatgttcgagaggtgttccataagaacggaatctggaggcagcttgtttgggcggctcattgagacaataatcaatgtacattgtatatactaggccctaggctctgctaaggacctcactgagagcactacatagagttaagtagcgaccggctcttcccaaaaagaagcaagaagatcatctcaaagcttcgccttctcctcctgcttcttcttctcccaccccttctgcgtcgcgaaattcacaatcaaattccaagcagcaaccccaaccccaaccggcggcacagccaacaaggtccaagcccaccatttcggactggaagctgcaatactagccatagcccccctaacagcaacctccagctgtgctttatcagcatcattccaaaccactaccccgcgccccgtcgtcgtcccccggaactccgcctgcgtcgctttcgtccgcacatctccctgactctggacccggttcgctgcatcctcggctgtgagatgtgcatcgcgggcgcgcaaccgcgccgtttggatttcaggatcgtgaaccccgaccacgattacggttccgcagatgagatccatcccgctctcgaagaggagcggtacatccaggacaaccgcccattggccacgcaggtagtggtagattagggctttgtagacttcccaccgtacggcggggtggacgatgccgttgaggacttgtcgatcccgtttgcgttcttctgtgctgccgaaaatgcgccgccctaacgctggccgattcagtggcttcccgtttggatttgtaggcgcatcgtccaatagtagatctggtgtactagggccgaagtagttgacgatagctttgtagcctgcggtgccgggttcgactactttgcgggcgaggagatcggcgtcgattattgggagggagtagggtggtgtggagaggatggacgagacagtagacttgcccgttgctattgagccggtgagcccgatgatcagcattttagctttagaagaggagagtggcagaattgtaaagttgtaagaaaatgaaggtgctgaatgcggggagataaattagcctcggctccgcattaagcacgttttcatgtacgtcacgtcacctatgcagctatgcagtaggagattctggattctctaaattccaaacttcatccagtaactaatttgctatatatccgataacaaactttggaaaatctgtgtagtctcggttgcgaggggtatcctcggcgtgcacttgtagtcgcatgaagcactgcaacttgagagcgcatatacgcagagcaagacgcctaacccaaggcagtgaaaaagcgggcttatatggctgatatcttccatcatcaattcaagtttccggcaatccatgtgaagtgtcttgtacttggcccttccacccaatagccggccatcccttgggcagcgaggagaatggtggcagggaatagcggtcgtcacagccaccttcccatggacaagtcagatcgcacagtccaaacactttgcagtagcattccttcgcatcggggcaatgtacagggtcctttccaaatatcactggagaaaatgtcagctttcgatcggaactgggtcattgcggggaaaacacatactatgccatgaatattccataattcgtccactcaaatcatcctctagcggcgtgtccgctagccatgtgcggaagcgctcgtagtcactgcgcggccgttccagcaccttggtgcgggacacaccaaattgcgcgcagcacgacacgcctacctcctctgggattggcatcccagggaatagctccataaatccatacttgaagtattcgccagcgtgtacattgccgcgatgcgtatccgtgagaggacggatttccaccgggcatccaagggtccaaacacatcgtaggttgacatatccttgctcttgtaggtatggaatctggagattttgtagcggtggaattccgtcgtagtacgggtcgtcgttgtgccattgatagcgtcgcgagtggatgaagagcattgtctctggtagattatcgtaattgtcgatgatgtatctattcaacagctcgagtcagtatgcgagacgaaagataacatattgcatgtcgaactcacgtcaaatacaccatcgactcccggcctttgttgcgcgccaccgtcaatggtgcgtgcttgtcatccaccacgtagatacttttcgtccagtcggggaagtattctgacagccatgacgtgtcatcacttttcatgctggcgacgaccatatcctttcgtctcggtacagcagggcgagccagctcgcctgnnnnnnnnnnnnnnnnnnnnnnnnnnnnnnnnnnnnnnnnnnnnnnnnnnnnnnnnnnnnnnnnnnnnnnnnnnnnnnnnnnnnnnnnnnnnnnnnnnnnnnnnnnnnnnnnnnnnnnnnnnnnnnnnnnnnnnnnnnnnnnnnnnnnnnnnnnnnnnnnnnnnnnnnnnnnnnnnnnnnnnnnnnnnnnnnnnnnnnnnnnnnnnnnnnnnnnnnnnnnnnnngcgacctcgcctgattgttttgtcggtccatcctgtatctgcgcatagctgcctttttcggtcttgacgcgggactttgttgctgagaagaataaaaggtatagggcgatgacgatgaagatggtaaggaagatagccttcatgcgactgcgacgtcgagggccctgaggcccgctaggagcgaacaacatgttggatggagggcactctgcccaggtggtcaagtcattgaggggggagaagttgacgattaacgggaaatcaagggcccagggagctcaagaaatccagggaagacaagtaggatatacctgcgatgttaatcagatactaattcatgtagtatctgtgtaggtaataaatccttgcgattgtcagagacatctaggaggtcgacgtgtcgcaagttgaagttctccacagccaagctctaactaggcgctgcggtgaatagctccgagtccacaattatagcttatagttagcaaggatagcaactgtacagctataacggttggaacatataaaaacaagcatattttcaaattatttagaatgcatatattgatgtatttgatatgatagattgaattgatttaaccacgatatatacatctgaccggtagatattgtctttcccccaggacatactacctacatatccatagatgtattcaccctatttgcatgcatcaatatgtcccaagtaccaattgtgtgctgcagtatccggattcaacgtccccgcatttccagacttcgagcccacgccgacaatgacatcaatatcagacgaggtcaccgtcgtattgtcgccactagtaatccagtactcaggacttgcgtggctaaagccaacagtcgcgggtggcaccttaggcaccaagtcgtctgtatgtgtcactcgccagagactgccctggtctgtgatatattgagctagagccttgttacccacccgtggctggccataagtatactagtctcattgtgagtatacactagcaattaaggcagatttccaaacatggtacttaccacacttggttcatatccgccatttcgaagcacaatacctcccaacgtggcaagggctccgccatagctgtggcctgtcacgacaagagtgtagcccgagtatgttgcctttgcggccttgatcttggatgtcagatcagctgcgacagcctcccaggcttccaagaacccgccgtgggcttcgcaaccgctgcagatactactagcatcggtgaagccaaagttgatgttcgcgatccagttactcagtgtgcgactgcctcggaatgagacaacaagtagcttgtttgtcttgtcaaccgcgaggaagccggcaacatcaccatagctggaggtcctgaaaggtgtcactgtattagcgaacgacttgtgaatgacattggaagttggtctcatactcgtcaaactcgtatagagtagttgtgtcagcggactccaccaaggggcagttgccttgctcgcaagataccccatcgccggtggagttgctattgttcgtgcagtatgatgctgcagcccactgcgagaacagggtcaattgaccgagcacatcagccgacacatctattgcttgcgtcagttggtcaatcatcggatggcatgaacaaaaggcaaacgcatccatacctcgaggaacagaacgagaaggagcagcaaccgtcagcgccgcaagagcagcgatactccaaagacgaccaaaaagaagcatgatgaggatctctggagtagggctttctcaacgggtgtgcatacacgtcaacacaaccacgcagacacagctcccttatgtatgttcggcgagtccaaatggatcccgtatagatcccgaagtccttcacaaatcaggacagcttgaggggcggggtatagcgcccgttctctcgtatattaaattgttgccggactcagctcaatctccgggcttatggcgcatatttcacgcgtgaccggtgggattccggcgggatcgacatggaattcatgcaactgttgagtttgtcaccgggaaatgtaacccctcagagacacatcggctgagtagatgatagtctgcatagtaaaatagcggagtatttcgtccaagtcgagattagggctgtgagtgggacgcttagttgcgccttgtaatgcaggacaaagttttgctgttgatttatttcttcatgcgatataagtgccgtgaagacgaatattttgggctctttgcatatcgggtagaaatagcttgcaaggttgttgattggtttctgcttgactgctccaggtggtgttcgacgatcttttctcatcttatactaatggcccgttgtggcagaagaaattccagccactcgcttccgcccgtgatcgtatctgtatatgaactgttggactgttgaactgttctagaggcaacgtcgaactacgacagtattattaaacacgtgtgatcattagaagcgtaaaattgatttgactgtatccattccattttcaatggaggttttttttggttatttctttttcccttttctctcttgagctctcgcaaagaattccattattggagaagcccttcttcgccagtcaaagccgtatcctgttcatcatcgctgccagcaaagaacctcgggccctcgggacactcggtgcttgggcccatactaggctgcgttagcgtttcattgtcatgagaatcactccccactactggtgagactcgatcttcatgccctcctcaactcctgtcataccggtgtcctgtccatcttctgcgccatcaccgttgaggataactcggggagaaatagtgtagccaggaggcagtggggtgccaggggtcacagcaacgatgttgtcgttctcgtcgaccatctcgaagttgtatcgcgataggagatgggggatggcagaaagttgggggccgtagcgggcagtgttatcgtacagctcgaacagcgggacagccagcagtttcatgttctttgggaccgatagaacctctagaataagtgatgtgtaagcagtgtttaccgcccacgtgaggcatgggttggaactcactcttcttcgggaggcggatgaagtacaacttcttgcactccttgggccgggtgacatggccaggcaggaacgggtacatgaaagtctcgaagttgggtcgccaccattgcgcaagtgtatcgctaatttcccagtcatcattaacgccttcgccagagaactgagatcccacaggtgcaaggcgctcgttcaggcgcttcttgaaaccttcaatctcatcatcctcaggttgcagataatcacctggcctgaaagacaattagcagtgaactgtgaatttatgcaactaaatctcaaagaactcacagcttaaagaatgcattggcaatctgcagcatcagcacatggggatggttgtgctcgtggcacaccaggattccctcgcaggttcgtcgcattccatggaggccatagtgctcttcaaggcgcttgagccgtgccagaaccgaaggatcctcttccggctgtgtctccttggtgccgaaggtatagttcgacagaggatacagccggacagtctccggctgctgagcggtgaagtccttagggacaatgggcctagaaggtttgtgttaggtcgcattgccatttcggagtttcatccatactacttacggaaatccactgacaggagcctcctgcgtggtagtagccatttcgacgaagcaattgttgttattgtcgagaacggcgagctgtctaaagctccgatgtcactatcgcttatcagcgttgaccgccttcccaagttcaactgtggaacatcgagtatacaacttagtaagaataactagttaactaactaactatagcattatttggttacttgatgtaatttagagggcatgctactatactatatagctgtatatataaaaaaaatagcaatgtcgaattaatttaactctgtggaccttgcggttgagaaaccgatgactgactgtatgtaccttttatatgtgaagccctagcaaacggtacatttgacggaaaccctatgttatgttgtacacccacttgtcaaccttacaaggaccgggtgctataatactcgtctgaacgtagtttgtttgattattatccttcactatatccttcaattgacaaacaccccaactctcggatacatgcaacccagaccaacaccaaacctactccatgtataccattcatagcttggcatcaaaatcctcatacacgctcaaatccatcgcaggaacagggccagcgctaacaggcaagcttgccttgaaggttgacacatcggtgataatgacaggcttttgggcctcgccattgccattagccgcaccctgaatgtcactgccagagccaagacccagctcctttaactgagcactgagtttctcgtccagcgtctcaaggacgggctcgaacttctgctgcgacaggccggtctcggtcaagaaattcttcacagcaaagataacctgggacttgtccgccgctgtcgtgtcaaccgaatcgaatgccgtagtgaagcgggcagaatccacgatgaagtctgcggcttcgaggtgcttggtggctacttcgataaggcgcgttctctgttcagctggtttgggctcctcaacctgcgcgcctgcctgggcgttcatgtggatggcgagcttggcgcgtgtggccgaagaggggtcgatgtattgctggtagaatgtaacgagatccgccttggtcaaggagcgcacattggctgcgtcggtctcatgctgaaggaaatcaaagcgctcagatccgatatgcgaccagtaccggccagtctcagagcctaggttcttgagtttctccaggcgcttgttcacgacgctgcgcttgtaaccctcgaattcttcttcgggcatcttctcgaggatggaaccgaactcgcggaggaaattctcaatgcgcgattccagataaggtgccgtgcgttcactctggataatgacccggtagcccatagtgatggcgttgtagcgtgcgccactccacaccacatatccgagctgttccttgctgcgcagctggtcgaatgcaggttcgtcagtcagctgcgcgaacagctggaccttcgatcgcaggacgtcgtcggcgaagagcccgatatagaggaagtactcaatgcagtgattgacgttggccggatccttgagcgaccgggggtagacatagttggcaccgggcggcaagatcatgttgcggcgcaagtaccactgcgatggaggcagagggcggcctcccagaatcttctcaatagagtcggtcatacgcagagcatcctccttgtacaggtttccgtgggccagcacttcgatgtgggtctgctcaagcagctgggggaagaagttgaccacatcatgggactcaacatgctccagctcttcaagatactgctcattgatccagctgcgctcggcaagaagatagcgagtataatccccgacctggtagtaaggctgctggtactcagcattgcggaatgcccgcgccaagcgctctttgataatatcgaaccgatcctggttgacaactagcccatgcatagtgttgagtactttgtccaacagaacggacatcttgtcgttatatccgctcacggaaatgtccaatcccaaaatgttcgccgagagattgtagtctaagccagcaagctcggcgtcgtaggagtattcatctagcgaatcccgaaccaactcgctgtacagctttgttttgatgagattgccaggcgtggcccacaccaatgaattgcggagcgttatctcgacactggccttgggcacccagaaacggtcatccttcttgaaccatagacgcacccggtcgtcatggcgaatcagcttagggttgatagctggctcggcaacctccttcttttctaccgagagtctagtcggtacaaattcgttcttgtgaggcatgtgcacgttggaagtacgggtagcctcagtcgactctagagccttctgaagaccacccaagaactcctgtggaatcttctcgaccttgtattcggtaccataccacttctccttctgatcccatgtacccgggaactcctgggacacaacgatcagacggaagttgtcagcccgcagatagctgagcgccttcttgatcaggtcagagtcaaatcgtcgcaataaagacccgctcagaagccattcgttaggcagtgacttttgcataacgctgctcaaccggctggtgaagcgactagccggggtcttctgcttgaaccggaaattgacctcggcaaggttcttcatctcgtcgaagatccactgctcgggctcgcgttgcttgatcatggcaatatactcgaagacgacgtttgcgacttcctggtatttcttcagaccttcgggggtcaagcgcaccgagatagtgaaaaatgcagacccagcgcagacaggcatggcgcctgcagacagaccattggcccaccccttggtcttgaggtaagaaagaacactgcccgggccctcatggccaatcagatggctgatataacggctaggctgggtttcatgcatctcctcctcatcaagaaaggggaaatacatatccatggatcgagtatccataaccggcttcacaaaaacctgggtgcacatgtccttctcagtgaagggctgaacaccgtcccagcggttcttagccaggttcttgttctcgacatcggaaaagagctcggagacccactgctccagggtgtccagagattctcgtcctaggacaaccaacttcgcccggttggccgagtagtgcttctcgtagaagcggatgaactcactgcggacttccagaccacgtttctgtggatcttctttcagggtctgcagattaccagtcgagaagtggctgtagggatgtttagggtttgaaagcgacttgttcagttgcatcaaacgccacaggtcactttgaaggttctttttattttccgaatccaccgcctgcaactcccggtctagggttgactctaggaaaagcggggcaacaaagaactgggcaaaccgatctaatgcgccatagaggggcgacttcccatctaatgcactcccatttgacacgccattgttatcattcgtctcggcaggggtgctgtctccactggatttcggggcactggagtcacctgtggcggacacttcaaagaagtagttcgtttcagtggcggctgtgtaggcattggatgaaccagagtgggacgccaagtactggttgtatgcattttccttcgggtactaaacaacagggatccggttagcattaaccctggctaggaatatggttgcagtggtaggttttaggttgtaggttgttaatttaccttttttgtgcccataaatagcaaatgctctacggcatgagccattcctggcatatcatcttcatcagagaagttgccaacattgacattcacggcagcactggccttatcggtgtccgggtcatgaactaggagggcctctagcttgtttggcaaacggatgacccgataagaacgatcatcaagctctggtctctccaagttctctgtaatacgctcgatttgagccatggttgggggtgtggcggtgaagtttggggttgaatgggaggatgaacggcgggtccaaaggacggaagaaagaatctgtaaaggtacgggccgcgctgaacgaatactggtcacagtaatacgtgacaacaaatcgggacaagggcgggttgagctgcgaatgagacctttgtgacacaggtttgctgcagaggaccttggaggcattcagttgccgaggggagagggagaggccaatgacgtgactgataaggtcaatgcacctaggaattccagagggtctaagaatgagacgcgttaatatatgcttcgatatatattgagtgggattataaaccaaatggaggggcctcggggtgatggatgttgtaaagtcgactgggagacaagcgatgttgatccagccgggcctggtggaaatactgcccagctactcgaggcggtgataggccctcgtagccctaatacgcgctctcatctaccgatggcgtttttccaaacaaggcagactcgtatccgaccaggattagacttaaaaatataacaatattcccattagcagatagctacatacatcgcagggtcctgggtggctccacgtcgaggctctacctttccccgcagctccgcaggccaaaacacaggggctagtggacacagtccccaccattatatcgagctatcacatacgtatggatccgggcgcttagcagttggctgcacagaggtccaggttaacactagtgtcggagttgcagttctttgtttggctgccaccggggttgacaccctgcgcccagcagatgttcgagcaagttgtgtctgtgggccgcacgacaatcgacttgccggagaatgggtcaccgaagacatctgacaggtcgtaccaaactgtgcctgggtccagggtgtaggcaaagttggtctgagggctgccgttgtacagaccgttgtcaacggtggtgatcttaagcgagatgccaccggaggcactatcgtggtgcagagcttcggtgtagctgccacccgccgggatggtttgcttggggccgacactgccaccaacggaccacaggtagactgggaattggcagtggttggtcacgatagcgttgccaacggcgctagcaagcggtgccatggcggcgacggaggcaataacggcagtggaaaagtgcatattggtaggattcagttggcttgaggtcaagtaataaagtctgttcgaggtgatgagaatatctctctcaggtaggattcgaagccctttatatagtttccttggtggattgagcatcagtttccagtctatacctggttctcctttgatacgagcataaactagattctaaaaggattgctaatgggaagaatgacggttacttaccaaatccaagacacctcatcccaaatcaacctattgaagccttaaccacttgggcagtggtcaggccatccttccttttgtatgatcttaccaaatccccgcatcacacggccaacagttttccaacattgatgtcagtggagatgcgagagataaaagggtccatgggtgtagcgaaaagaatacgatgtctcagagcgctccgacccgatcattggatgtatacattgcataggcaagagcaacaattatgagattagcatgagctttctgcttatgcatgccaagtgtggagagatagaaaaaccaagggctttctggcataacaatggaacgagttgtgtcacgcctggatttctggggtaaaaagtgagacattgttacatacatccagggacagcacgcagatcaacgccatactgagaaagtaattatacgatatgtatgtctaaattgagcagaaatcagctcatactcgccgctctgtcttggagactactaagctctagagccatggttggtgatgtgtcatagtgaagtcccaaatgtctcaaaactccaaaactgtgctgatataactgctgcagaggggcccagggacttcacacctgacgtcttctctgatggcggtggacgagaaagtattagaggcgacaaatatcaaagagagaaatgttttccacaacccgttgagaaatgataagcaaatatagtaacaggactggcaagataatttcatgtcattactagggtatgaaaagagggttcttcgataacagaccgcataacaccatgtacagccttgggaattctacggttcacgctcgccgaatcgatcaggaaccagtaaaagcaatcacgaatcttcgtctgagtcctcctctgtccggtcagcacgatcggatatccacttgaacacttcctccttatgctcgtcaagcatctcgttcaggtccgttttcggggaatgaaccagctgtccgtagcgcttggaaggccgtcggtccaggctagtccaaataccatgggagtctgaaacaaacacaagggagttctgaaatgaaaataatagcgtgagtaatgcatatcattgacgaatatattgtgggtggcttacctcgcggtaccacttcgagagccacgtctgcgtctgggatgcgaccgcgcggacggggtctacagacacgaaggagatcacgccgttgacacgcttgtaaaggttttctgcttggtaattagcaaagctgcatagccggatacccgattggcctaaacatacccctgttgattagcaagttcgacacgccaatgaaagcgttgccgacgccgagcaggaaaatttcggttgcctggttcgcactttggtaacttgtcagctcaatattaatcaatgttcttcgccggtcatcgctcactcgatgtagttgtcccacaagtatccggcaagctcttcggtggcagacgggcggtcctcgtcgtccacctggtatttaccggcagtctaaacccatccaaattagttgattgcccgtataaagggttgcatagcttgacttacctccttccgagttacgaacttgggaatgttaacatcgatcaccgcgtagcccttgcccacgatccatttcacataatccgagagcgaatcggccttttgttatgttagcggacaatctcagtcaaccatcttgggtcacgtaccagccacacattgtgcgcttccaacttattggtcacgggatgagcctgtcccacaatctcagggctagatactgtcaattatagctctggcggttgattatcggaacacttacggatcgtggaagatgacaacaagcggcacacgttcgtgatagtttgtgctgccagatggtgagttcaggttaggatatcaaggttcggtgcaacttaccttgccagaacttgtttgtcaaaggacttggaaatggcggtgcgataaatgtggagcggggtgagcttgcaggtttcatacagctggttcgactggtgaacacggaggatatctagagggcttatcagctctgttgagtaagagatagtctataattcttaccgtgaagacgattcgcgtagatcgggtgagcagatgtcttggggtacaggcgactccaatactgggattggatgctcctcacccggcggactgttgcgaccgcagagtctgtcggagaactgctcaacaaacggtcagggggttcccccataagggtcttggtcacagccagagccgacttggagatagacttgaagttgtatccaccctgtttcaacgtcagatcaagcaagcaacaatttggagaggcaattgacatacctccaagcaaacagcgatctttccattggccaaagtcatgagcatgtggatcatttgggcataacaagctggcgagacaaagcaggcacccagtacatcgccagcggcagcatcaaacccagcagcgactgtcatggtcaataactctatactagataaaaagagggggtatgctcaccaatcaccatgtcgggatcgaattcttgggcaatgggcatcaccacttcctggaaggcgaacatgtaatcgccatcgcccataccctggtcgggccatggaatattgacatttctaagaagcgtgagactttagccatttcattcatatgcttgaggaaaaactcactttccgactccggcgcctgagccacattgatctgagtctccagcagggcctccagggtagaagcgaccgtcttggtagacatgcatggaaatgtaaagaacattagggtcctcgtaaaatgcttgctggatgccgttgcctaagatctgtaagcttggattgttttcaaatgtcatactatgggtctaagcataccatggtgaacgtccctagcacaagttagtatttctgcagtgaccaaacggtgatgtggggtactactgaccagtcaagaatcatgatcttccggcaagcgtctcctagtctattttggcaaacgcgtgctgcaacagacacattgttgaatagacagaatcccatcgcagaatcatgctcggcatggtgaccgggtgggcgaatgacggctatagcatttttcacctgacgttgggcgacggctaagcatgtctcgattgcgcctccagtagacaaaatggccgaagcgaaggtcagattattaaagtagatggagtcacgttccttttcgagctgaataagttcatcgttggccatatctattgatcgagtcagtgaatctatccaggccagcttttccggtagtagcaagacatacctgttgtgcttcgaacaaatgcgtagtgcgcttcatcatggacgagggtgatttcctcctcggttgcattgcgagcctggatccgttgcaaggttttgggtgccaaaggccgactcgattctgggtcgtcaacaagaccggcgcgacataactccttgtagatgtagtagatgcgtctgggatcctctggatgaacgtcactctgtggacaaacctcgcagtggtaacgcatgcgaggatcataacaaagtcctgaggcaagcgacgccagtggaagacccgccttagccatgacctcgtcgtcagaccagtcagagtcgggctcaactaggctatcacgttttgacaactgttcgacggtgaaaatatcaccttcgccgatcttggtcaaatgttcaggaggggccattccggtggaggcgatggccaccggaggttgagattgctcggagccaggtgttaaggatgcaggaatcgcttggtgaatggaagaaggaggaagattgggagtcgggtgattgctgagatgcgtgggaagatggaatcggtttgcagtcaaggtggaggtggtatgggaatcacccataactgtatcctcgtcttcgtccatcatgagaggggaagccgcgggaagctcttgatataattcaagcttggctcttattagctcattaccaagaactaccacaatagaggtgttgagcttgtgttggcaatcttggagctcaatatcaaactaatagtgattcggttgatgttcctggtccaggctgtcgaatgcgctttgcacagcagaataatttgaaatatatcaatcggtcaaatgttccacttgttaaacaaagattttgtttcaccaaatattataggaatgtctgaaggtgcgatttgagcaagcatacggtggtataccaacgtctcctgccgtatgttcgactgacgctgcaatgcacccacagtatgatgaagcaagagtgatcttcaagtgaataatttctaagagagattcaattatagaccttcatgtagtgggtaaaaatgaagaacagaatccaagtccactgagtgacaaagagacaagggaatggatcattggatcccttttgggccagtctttcttattgccagacattcttgaagtcaccgccaaattgaccgccgctcggaatggattggcgtgatatattataattggcggtgagcatttagtatgtactgacttatcgttatcaacaaccttccaaggtgcatggataagaacagtcggcctatacggcctctatacttgatgagctaggtatttacatagttctaaggttagccagaggtgattcagctatgacacattgaagatgatgacttttgtatgaattttcttggatatcttctcttatcaacatctagacagaaggaatgatagatcacagaccatggaatttggtggaaggcataatgctacaaaacgacatttccatatataacatgtgatgtacccagttatatgtttgtacataggtacatatgcaggtagttaagacatgcagcatacttccaatggtcaacatgtaaaagcttaattttggcaagtgtgaaagtgcctcgggattagattgattgtatatgtatatggaggcaaagccattccaaccaaaatgattacgatagtacagctctatagcagattggagaaaatgaattggaaatggttggtttcattaaatgacgttatcatcttgtttttttctaccaggcggagtcctcatgcacccatatccgtaggctgtggaacaaggagctcagcaccttaaagaacactcttgaccccatgacggggtcctgattcctactgggaatccacaccggcaatgtaggagatgaggtcaacaacacggcgagagtaaccccactcgttgtcgtaccaggagacaagcttgacgaagtgggggttaagggcgataccggcggcggcatcgaagatggaggagcgcgagtcaccgttaagatcggtggagacaacctggtcctcagtgtagccgaggatacctaaaatagtttgtcaatatgggttgtagacgtgatcgaaaaaaaagataactcacccttgagctcgccactctcggaagcggccttgatggtggccttgatctcatcgtaggtagcacccttctcaaggcgacaggtgaggtcgacaacggagacgttggcggtggggacacgcatggccataccggtgagcttgccgttgagctcggggataaccttaccgacagccttggcggcaccggtggaggaggggataatgttctgggccgcggtacggccaccacgccagtccttgttggaaggagcatcgacggtcttctgggtggcggtgtaggagtggacggtggtcatgagaccctcgacgatgccgaagttatcgttgataaccttggcgagaggagccaagcagttggtggtgcaagaggcgttggagaggacattgatatccttggtgtaagacttgttgttgacacccatgacgaacatgggggcatcggcggagggagcggagatgacgaccttcttggcaccacccttcaagtgggcactggccttctcctgggtggtgaagacaccggtggactcgacaatgtagtcggcaccggccttaccccaggggatggcagaggggtcacgctcggcgaagaaggcaaccttgtggccgttgacaatgagaccgtcatcaacgtactcgatggtgccgttgaactgaccgtgggtggagtcatacttgagcatgtaggcctattccgacgggaggttaatatcgggtatacaatcggttgggttgaccagaaacatacagcgtagtgagtctcaatgaagggatcgttgacagcgacaacctcgacgtctgggttgaggagactatattgaggatgggttaggatggttctcgggtcattttgttctctctctctctctctctctcctcctgcgggttgtaacttacgcattgcggaagacctgtgatgctgttagtgactgaagctgacctgtgatgatccagagaatgacttacaatgcggccaatacgaccgaaaccgttgataccgactttgacaaccatgattgcggtttactagaagctgttagctcaggtagaggaaggacagacaaggaaggatagagaatggatggacgtactgtaatagtgaagtaattgaagaaaggggaagaagtgggatggagagagaaaagaagaagaggaaaaaatatctgggggagggggaggattaatgaatggatgactgacgcaatggacagatcacgcccccccgtctcaccgaatcaaccctttcactcccacacagcccgtcagatcagaccgagctagatttcccgaatgttgccgttggcacatccgcccagcaacccatttccggtttcatacaccggggaaagcaggaagggccacgatattggggtcctcatctgcccctcggtagctcccgtctaccaataggagcccgctagacccaactgctcttcgggttctcactacgcttcggagctttctcttgaatcttttgcctattcggtgcctatattcgggtatacggagatgagcacgataatcttaggtacaaatatctgtaggcgttcccgaggttgactaaggaagctatgacgatgtggtttggaggggtcgatgaggggcaggaatgtaagtgatacaacataggtctacaacatatagaagggattgtccagttaaacccgtagaattaaatatatcattattattatcttctttcgaacggaaatgctcgattcctccactttggcgggccaaccgtgccgcttaaaccactgcggtggacggatcgagtatggtgatctaacttggtggctccctccgccctgaaaggagtcaccggtatctcacatggggccacgagactctcatggtttttttatttgttgattggaattatttcatttgagcttgggagggatttgactactggggtacccaataactattctaatcattggatgatgatcaaatgccgcaacagcaccaatcacaaaatgagatcctacaacctgtggtatctcactggtaatccctcatgcctaggtggtagctgtgggagcccagacctcatcagcccatatcaacgtaggatgcggagccgatacaccagtggcgcaatgtccagatgggtgccacgactgagcgtccttttgtacaggatctagatcgtacaatctgggggatggcatgaccacaggattcaagaaggattaaagatatagtccaggcccgatccagaaaaggagagtctggacttgaaaaaaaggatgaattatggattatgatacaatggggagaaatgaacagtgtgctatcattcatatcgaccatcgaatacccatagctaggggaaatcaattgatggcctagagcaacccagcgtttgtatttattcctccttgacaccaccgcgccagttcttctcggccgcctcgatggaggccttatcgctcttgggtccgccctgggacatgaagccaccggcggccttgaagggacgggcgagatcaccagtagcgggcttgccgaagacgtagatcttggccaggttggactcgaaagcgcccttgagggggatgatcgactggatgaggagggggttggtgtactggaagtacaggtgcatcacgcccatcatgccgacacccatcagctggctgcggatcagctggcgcagctgagccttgtcgtagtccatgttggtggtcgtcacgggcttgggctcctcggtgctacccatcgtggggggctcaacgtacttgagggttgtcatgtctgggggtatcgcgttagttttggtttttggtcatggagcacgcgatcgatcgacatacccttcttttggttgatcttcaggtgggtgtacaggtggacagccaggatgagaagattagacaggatatagcatgcgcgcaccagcatcaagacttgagggtcctcaaagggaaccttcttggacagctgcatcatcaccaagatgatggcgaggttggtactgtgcgaccatggtcagtttccgcaaagatagatgttcgatttgaatcgaacaattgtcgatcaagcatacatttgaggagacaccattttgccggacacttggacacttttcgatacggggaaatcgttgagtatgggggagacaacgcgaacaaaattgaaagccgcgggccacctggcatttctggaaggtcagggagtcggaagaacagttatcccgacgcgatctatccgctatcgctatctgatggcctgaggcattttatcttgtagcctgatacataaggctagtatatcatgtgacctccccctgccggtagctggtagctgtgatggtccagcttcaaaccagaccagcttatttgcaaaacatcagcaccaccacaccagtgaacttatattttggcttagagttacacaatggtgtgggttatgacaactacaggggtttcgtatgtgaatacggccacggatgccggagacctccattgcaatcggacggctcaaggccacacttggcttccatcatggtctcctcgaataccaaaactcactatggcttctgtctatttttgagatagagaaaaacaagcgataaccttcacagcaactgatttctagatcattcaaatggctccacagagggccatctatacaggcaagaaaccgaatgctgagaaaggacggttcccctttgggactagcgccaagtgtctttttggcacagtcggcgcctggcacattctgacttctccatccatcaacaacgcgcgtattttccgcactctgaatcccctccacgtccccaccacggccagatcgtctcgatttctgtttctatctgctgtacctacctctgcgaccgtcttcgcacatttatttcgcaatggctggtggaaagggaaagtctatcggtggaaagggtggaaagggtgatgctgcggggaaagcccaaaagtctcacagcgcaaaggctggtctgcaggttagtgggatcatggcttgtctattacttggctaggaatcatttcatctgagagtggtaaagcgatacgggcgatgagttactcgatgaaactgcctcgaagacgcgtcgactcggtccctcgttgctgttcgataaggggtagtttctttcgctatacgtgccgtcgcacgccctctcttccgaccatgttttcctcgaatcgccaacggtttcaaatgacgcgactactaacccattttcactctccagttcccatgtggacgtgttaagcgtttcttgaagaacaacacccaaaacaagatgcgtgtcggtgctaagggtatgctatgtcgcttggacggatctccgacgtgacctgtcgctaacactttttcccacctagccgccgtctacgtgaccgctgttcttgagtacctgactgccgaagttctcgaactggccggtaatgccgccaaggatctcaaagtcaagcgtatcactcctcgccacctccagctcgccatccgtggtgatgaagaactggacaccctcatccgcgcaaccatcgccttcggtggtgtccttccccgcatcaaccgtgcactgctcctgaaggtcgagcaaaagaagaagggtggcaagatcgagctctaaatcaacctctgaaaagttccggaaaaaaatgggctggcagcgggagtagtcgagacctcaacacctcgactcccagccctccgaccaatcccggccgcccttttttttcagtcctctcgtctttgtttttcatggcgctctactttgatatattttttctgatattccccggtctttgctttcaaacctgcttttttttcattcgagttcatagggcgctgtaatgggaaaatggggatatcctggtagtgggaattttactgattcgatgtgcttcaccttcactaactatgtggtaattgtaggaattggagtaattgtagaattatgtattgtagattttcacgcagtcgaattccaggataatgcttccgtgatcggaccgattatcacattcctgaggggtcaaatattgatagacacttgaccttgcatataaagtcacgaactttgttggctccacgggggatcgacagggacaaatatgcataactacgataaacaacgcaacggaaccgcgtcatttgttcttggcatctatattttgggttaataggttcgtttttgctattggaaattcagattggaagtacagagtagaggttctattgtcagaatatttacacacaactatgatctcgactcacctactggtaggatagaagtcaggttgaaggtagatggattgaacagtgagaatctgagtacaaaggcaaaggcaatggaaaaaaaagaaattgctggactgcaaagacaccaaacaggaagaggaatcccttcagaatgggagttggaaaaatatatcaacatcactgacacaggaatgcagaaaatgcatccacactgcataaggtagatctgtagaatcggcacagtcgaaggcagcagaatcacaatatagctgtttcagaaacagcagtggtccctgatcaccattccgcgagacgaacgaccaaggggaaagcagtcaaagcacgcggaaaagaaagcaaaaaaaagtgaaaatgaagaaacaggcatgtcacaaccgccttacccggacagatcgaacatgaatttccccgaaagattaggggaaagcggttgtcggggtaagacgggccagaaacattaaaacggatgcgagtcaccccatgtacaaactaaaacagacaagaatatgcaaaatgctggtattgtcgtttcttctgccatcggcaaaatgtcttttgtgtcattcttcgtatgcatcccatatcaccaggaggcgttcggggtcgtggagttcgttccgacacagcataaatagaaatccatggatttgcatgcaaggcgcccgcaatatcagaaagtgttggaaataaaaaaaatatcagtccagaacaagtccagagtcttcttgaaactgtgtgagtcggggaaaagttcaaaagcgttcatccaaaccgcgtgtcttgggctgccccaaaaagaaagaaacgtctaaaacttggctagatcagcgaaacagaggattttctggtctttttttttgtgttgttgtcatctcgtcatccctcatcgaatcgtaagccggtaattcgcagaacagggactcgtaatacaagtcgtattcatctcgcggcaaatcagtcggatgctggcaataaaaaggggagtcgccatcttcaataaattcgtccaatgttctactccacaatgatctctactccggagttggtgcggagttcatcacttccgcggctttggtggccgttctgacggcgaaacccggggcccttgtcgggggtcgggccgcggggttggcggacgggcatgcgctcctgctggccgtcatatcccatactcatgccacggttgcttccaatggcgccagcgttggattgctggctgtcctgctcccaagagaacatgcctcttaagcgacgagggctcgagttggggccaccgataccggtgccgagggagagaccacccaggctgttgaccagcaggttgtcatcacgctgcatgccaagagaggagccagactggacaggggtgagggtcggggtgttggaagtaccagtgggcgcaccctcatactggaggcgggcgccgttggactgcaacgcggcggggaagctagcggaggaaggcacgggcgaaggagtgtaagatctcaggtcggcaaaggacttagcagcccgtaggttctggccgttggcgaagttgccaggagagtccatcacgcccagaaagcccgagttctgtccacgcaaggtgttgaaagtgccagggccagcctcttggcgagcctcgccgaagtcgatggtcgccgcccggttaaggccgcgacgaccactgtctgactggccagagggcgggattgaggacgtcggggggctgacattggcacctgcggcgatcttaaagacttgcacctggcgctgttcgccgctaccacgtgaagcatgtcccaagcccatgttgtgggccagggtgtgaaccgtgcgacgctgagagggggtgaggttgtgggggaagatcacggaatcgcggacagtatcttccttaaacaggagtagttgggagtagtaggaaagggtctgggtgtcgttcaagtccacatctattaaaaaagacatggttagcgacaggtcgagatttcaataaccttaaaacgaatgtgttaacgcaccaattttttggccacgctgggacacgggcgaaggggaggtggccgggatgtgcgaggtgagtgaagacatggagctctgcgtctggagctgcggaccacctcccatcgggcggtgctgttcttccaactggccacggcgttcccgcttctcacgctcgatccgttcgcgctcctgcaggggaagcatcttcttgtattcgactcgtaatttccgaccctgtagctcaaagtggttgagcacctcgatcacggttgctgtttcctcggcggaagtgaagttggcaaaggccagaccacggaagacaccattgtcaaagtgatagttaaatgcgtagggcagggggaggttgagttccgtcatcaactgtaccaactgttccttctttacggcaaaggggatattcttgatgacaatcgcggttgggatcaattcatcgtcatctgcagaggacgcggaggcttccggtcgcatcgcgctgctctgaatgggaccagggcccagattcgaaaatgcttggggcatattcggttgctgatccaaccaagtctggagaagcctgttagtacttttttcctttttcgcctttttcgtacctttggacgagggggtccattgtcggataagatcaaacataccgtggggaggccggcacgtccacgggcattaggcttcaaactggcggaggccgagcggattcctccgagagcttgagcattggcaaacccgttggggttccaagtctgcgagccagatatatcatatccgtagttgttctgcaaggacgggttcaagcgttcgaggcgagcggactcgtaacgcatctgatcttgctcatacatgttggtcggcatagggccgtacgcatcgaactgtcgagacggctgacggtgtaggggttgttgatgcctctgagacccaggggaacgcgcagaatgatcgtgatacatgtcttgttgataactcatcgagaattccggagggaggaatgtgaaaatccaccaaaaccagttttaaggaaataattgtcactactccaccatgagagcgacgcaaggcgtggaagttgaagagaaaccgtcgagggacgggattgtgcggatgttttgggggaggaaaactttggagtaaaagccgatcggagggagattctggggcggagaacgagaaaaaaaaaataaaaaaaacgaccaaaaacgaccaaaaattcaagacacaaatccaagacagaatatcttcacgagatcacgaaattaaaggcttcgttttcattcaaggggctcttgttgctttgctgtttctttttttccctttggccgaaggtgactggttccgtgtgttcggggaatttccctttggaaactggctttcccaatatcaaggcccagatgaaggagacaaaagacaagagagcggggggagagagagagacgaaaggaattcaagagggaaaagcggtccacaggtccgccaagaacggaggggagtaaggaggtgagttgtagaaaagacacaggcacagacacagagagaggagaggagagaagaaagagatgcgatgatgagagatcgagtcctcaggcagaaagcaggtgatccgttagatatgcagctgttttatattaaaccagtaagaaaaaaggatgaggaaatgccatacttatagcaacttatagtcactttatatagtccacctctctagtttatattagatcttcgacttttattcccccctggatctttatgtggactcgcccaatgagattataccatttaatcttcgactgcataaacaagtacaccgtacattgcaagtctaagtacggagtcccggagtggtagatattgcttcatgcttgaatttctagtgtatccccttttcctacatccttctggaatcatcagcatcctagatcagtcgtttccccaaccgttccagtcacctgagtagctccttatcccaattccgaattccccttagtcttttcttttaccaaggagccggtgcctcgttaggctcgtcactaggcgattttagaggaccccgctgtggtggaccactacttagagcttctcatccctgagcagattgggggaaagtatttcgatttcacggagtacggaataatactccagtagtccagtactccgtacttctgacatactcttgctcatttgcagtcccacgggttgcctgacgtatagaagtcggggttcgcgccctgcctcgtgcttttgcaagggggtgcactgcactatactgtatgttggatatgtgattctctatatttgatacaccggcttgcactttgcatatggagtatttatcatggactccgcttccttttaattactgtacgttgtactcccgtactccgtattatctgaatgttccatctccttcagggggggttttctattattactcctgaggttagtttcccccccctaatttcatttcgccccatccttccacccaaggcgaatccatgactcgccaccttatgaacaagccacctgagttattttaacagctctccctaatggttcggcccagtcggataagccaccttattcccccatcggctgctgcagctgaaagctagtatattgtgtcccactccaggaaattggaactttcgtccggtacccacgatccgcgcatcccccgtttctagcgcatgcgtcgaagctcctcagaggctcatatcgttcagctagaacccgctagacgctggttaaaccatttagtggcagtgtcagatcccggtcgggtggagctccggacctcatgtggccgagctagaacccgctagacgctgattagaacatttgctggcagtgtcagactcagatcccggttgggtggagcgctggagctcttcggctcgtggttactaccacaatcgtactcggaattgacatccccgtcttccgtacggagtatggtcgctgaattcagattgacgctagaaaagactacgggaattttggctttggatggctctgattcgctccggttgtcattcccgtaacaagtactccgttctccgtatggttcggggaggttgacaagagggatcgtatatttcacacactcaggtacatctgctgaacctgcacgaccttctgggagtttgcgatcagcgacccaaacccaagggaaaattatggtagtggattgatctacagaggatcgggtcgggtcgcaaggacatccgcgtgcttcaggagaaattcgtgacttaagagggaaagcaaccctggtccctggctagctctatgaatcctaacaacaggcagaccttgaacagaggcaaacagcccctgaggttcatatccacacaatttgaatgaacggaggctaacttggacatccgacatgatcctcaagcctaggaatagaacgataggtagagactaaccacagatattgaactgcaactcgtataggaccagtctggaacatcaaagaaaaaagacaaagaaagtcagacagctgcaccaggaaaaggcaatatccagatgtcatggctgacagtaggctccccctggaaaataagacatccttctaacacccattcttgatctttgaactgagtcaaatttgtgtccgtacgagccattcttgaaccaagataaccggagtcacggtcaaagacatccttgaaacgacaggctgtcagtttcaagaagaaaccaggaaaggcccaataataacgagactaggccctggaatgaggcctgagaaatcaggccaagaagcaactcatcttgaacgtattacaacatacatcgtagggactgatgcaaggcgacaatggaatatgtaatattccaaggcaaagccgtttgaaacgttctagtgttgcatgctaaaccattcgttgatcgcatgcagcattatgcagccttaggtccgctccagtcaaaatatcgcgagttttctacctgtagaatggccggtcgcataaccagccctgttgtgtctttttgatagtcctattagatgtattttttatcgatatcttctttcttaagtcttctgatgtagacggaaaacgcggaaaaggcatgatttgacttttctatgtataacctttgatattgaagtagtaccgtagttaaatatttcatatattgcatattaactacatgcatctcttgaagtaattcaaaatcaaaagatcgacagtttcatgataacaagatccaatattcgacccgagtgagtgacgactgccagacccacatagaaagaggttgcactcgccggattgagacctgagcagtgatgatgatttcacttgaagcaaatgaaaagtggccaaaaaccaagcagataagtctgaacatattttctaggcggaaaggcacctaagtatactgtcagatagggtacgtatattgcgtgtagcaaccacgcggccaagctgacgggctgaaggctaaggcgttcgaagtggagactaacgtccagtttaaaagtgcgggcttttcgcttcgactcggagttcgattcgatttgctcgatcctttcgatttctgatcttcaaccctccgcttgctggacaatgcggactctagcacgagcggctatagccattgcgctaattctaaccctgttttgggtcaaatcccacctcgaatccatcctgcaatggcgaaatgatgaatataattccgatctttatgtcctaaatggcgatgcgtatatcgagctggtctcggcccatactgcgacgcccgcgacgccatcacatacccaaacccggaggaaatggtcccccacggcccgaccaactcctcgtctaatgatagccaatcctgaaccggagcgcatccccgtcgatgtccccggtgctgaatgggcgggggagctatggttcagatctgaagaggaacccgaattctatgattcaaacggattcgacgatgcccaactactcgctccagtagagcataatgatgtcatggcaccttcgtctactgccccttctcgtccaaaggtcactccgaaatcggatcgcatcattattctggggaagatgtcatacgaagacactgattggctcgaggatcagctgccagagtatgcccccatagaccaatcactagtcgatcacaaccgtgccaattctaactgaattctagatggcaacacgcagtttacctcgttgatgaccccgaagcatccctgcaagtcgagcaaaacaaaggcaaagaaagtagtgcctacctgcaatacattttagacaactacgacaaattgcccgagtacatggtcttcctccacgctcatcaatatagcggccacgtcgaattttgggagcaggacaatgtgttgaccgtccaaagactgcaactcgactacctccgacgagttggatatctcaatctacgctgtgactggagtcccgggtgtcccgacgaggtccagccatttcgacaaacggctggtcgcacgaccgagcttgcctttgcgggtgcttggatccgtatctttaacaacaccgatgtgcctgagatagttgctacgccctgctgtgctcagtttgctgtgaccagggagcaagttctccaacgcccacggaccgcctatgagtcgtatcataattggcttatgacaaccgagttggacgacgagacgagtggtcgtgtctttgagtacatctggcacattattttcgggcaggatcccgtgttgtaagttgtagcccacaaaaaaagtccagggaattgatgttaacccgactgtgaacagttgtccggaaaaggctcagtgttacaaggatgtatatgccatggattatgaagagtcggctatgaatttctttgatgatggcatctggggcaattggtacgatgaagcacctatggacgaaatacctatggatgaaatacctatacacccaacgcctgtgaaggaaacacctgtacatgcgacacctacacatacaacacctgtgaataggatatgattgtatttatctaacggatggagagcttctgggatgtatcaatacctggacttgcgctaaagttcaatctgactgctttttagttctgttcctgtatattatttaccttttctgcttattctagccagtcattgacatatcctccccaagtgtactcgatcatagctatactttctctcactcgggtcttttccaaaaactcgaaactgtcaattgcttatactatggactatatcaatactggacataaatcatcgatatcatctgaaaattcaaaggaaaacattggacatattcataaaccatcgagtataccttcactgacttatctctgaccgagctccaaatccgttgactcacagccaagcaaaagccatcagccccatgaatcctaacatggatgtagcaccgggagccgaaatactagctgcagcatcaggagtaggagtaggggaggatgcagagcctgatgaggcaccggcggagtcagaagatccggaagagacagatgaagtagagtcctggctgcctccgctggtgctagaagagtcagttatggttgccgtgcttgaagtagcagtgctagtagattctgtgctggtagatgtgccaatcaaagtagtggcagcagcagagtaggtagtcgtagtaagcgagcaagagcggacaaggtcaagggcctctgattaatgcattagatttattttgtatcttattagtgtattcacattatacacaccgttatcgtcgtcattatcatcgtcgtcgtcatcatcattgtcgtcgtcgtggtgagttatgttatggttgcgcctgtcggtttgatactgggtgatgcaagcggagcagagcggaatctcggttttggcagcatcccaatcacagatgcattggatctcagctgaatctcgttcgtatttggcatcacaactcttggcaattccgacgacagagctgcaggcaggccagcagcggttggggacatcgtcacggtccaacttggatgcaattgcaatgctagcaagtaagagaccgcaaatagggaggagctgctgagtatgcatgattgttgaagttgatgattgtataataaaaaggaatttaattgtgtctttgttcttgaccgaaagcaatggcgaggattcaagacatatttatattgttgaaggttgatataactcttgttcgctaagcccactccaagcaactgggtaatttattttcgctctacatgtagaagatattattgtcggcattctccgcacgcatggtcagagttctgaaatagaaaacagacctccaaggtgtgtccacccttgtatcgaccagcggagtgccgccaatgttgattgtgtaaaagtagctgcctggtttatgccatcagccaagactgcgccaagagcctgaatggaaattccgacgagatagtactaataatatcgtgcatttgggttctgcgttttgtatatttttctatcaatatgcaggcaccgtggctatgctctatccctgactgagctggcccattctgaaggtttacaatctttcacttactccatacttcatacacctctccatttgccaaggaagggtcttattccaccccggagatcctatacggacaagcccacctgggcagtgtctaagccacgttgtggggctaatcggtgcataccattcaaattctgcaaccttgaccataggttaatcgacatgctttgttgtagctgtgcggagtactctatatcaaactttgagttcgagaaatcaagtttaaacctatatcaagtggaagaagctgcccatgtgggttgccgatagccaccattctgctatatatagatagccctgaagtatacaagcgacgataggtgctatatgaatggttaatctccaggcttcaggattcttcaaaagttcttaaattaccgcttgtcagtctatcgacaccattcgatatgatcttggcggcatacccttgacgtcgctcgaagtagcttggtaaacagctagtccagactaaccgactattgataattttgccgaatttgaggagatctagtgggcttattcgagtcgccatcaataacactcacgaaccgacgagatatgaccggcaacgtgtacgagttggccaggacagggctcagtagaactcgcatatttggtcgctatggcctcaatcaccgcgttctggagatcacccttgccctctaatattttgaatggcagctctgtcctgacccgatcggtcatggaatatacagcagcctgtccgagacctgcagcactcaatgcaaccatagcagcccctgcaacttctttcagtctccgaataaaattgacataatgctcctgccgtggcgatccttcttcggtagctgtggcgttgaggtgcctgaaagcacccttcacacgctttgcttccgtagctttgaaaccccccctttcccccgcaagctctgacacgcccaggagcttacgaacagcctcattcactgtcagtgactttgggcgatttgttacatgctgaaatgatcgggccatcttgtttgatagtaaaacagtgggaggtcctaccgaaattcaggtaagatcgatgggaaagttgcgatgtgatgggctatcggcggaaatcgatcggaatcaatggaaagacgaattgtaatcacgtggtatatcacatggccgcaactatcatgcggtactacgttggaaagactgtgaagagtctgcttggagtgggaagagagctagaatatcctaagaaacgtggctcactacctagccttaaatgtgaggcgagatagtctcagcgtagcatgtgcaaattgaccgagtgaatttctttgacttggacagcgaagcacaatcgactgttacctcacctgcatattgggagcattcggtgtcagttggctatcaagtattctatggcgtaactgggatatcttcattggaccagcaaatcaactggcgttctgaacttgagaagacttgggaagaattgataattggcttcgaagacgcacatatgttgcagccacatagttctttcaatgctcctattggaactatcaatcttcctggctatactagggtcgttctaagaacttgtgcagaaacgggtgttgcgttgtgtctcgcaaccacggaaatcaaattctgatgctatatatactaagtattaccatcgtatataagaagaaagagataaaaaatgttaggaattgacaagaaatatatgtggtttgcaggaataactagagaaatcggtaaaaatgggtctatatcggcagtttctgaagtattcccgtgactttgatccagagtccataatcaacttgtgctcagccgcgattccgatattgtcgttgctatgaggtgccagattgactaagaagaaagagcacattcaactaaataactaagatagagaaagaatgaagaagtacattgcaaagtagaagcagttgatatagttgagcaaacttcgaacgtctggcttagctatctaacaaacaatctacttaactagttatgtgaatgcaaactagtaagcgagcaagcaagcaaacttgaatgcctttagggttgccgtgcccaggtgaaacctaaccatgttgttagtaagaaagcgttgaggtggacccccgcaatcataacatcatttccaagttaaacgtacttctgctctcatttctaattcaaccaaagctacccaattaagtaccccttctcaattcccccatcgacatagatgactcgagcagtcgggaagatgtgggaaaaatactgcttgcgtccaactcggggcactatctccaccaccatcccagttttcatctacggcacagcctggaagaaagaccgcagtgctgatctggtttatggtgcaattaaagccggttttcgggctgtggacacagcggcccaaccccgccattaccaagagcatctcgtgggggatggcatccgcagagcaattgctgatgggatcgtcggccgagcagacttatacgtgagtggacagctgcgatttttaacttagatatattcaggattgatagctaaccatgattaggtgcaaaccaaatatagtcctgtctcggcacaagacctggccaatatgccatatgatccatcagcgacggtgactgatcaggtccatgcatctatcaaatcttcattgcataatcttcgctcaaatgttgaccccgactccatggatgatgcctacattgacaccgtgatcattcattcgccactgtcaactttagcccagaccctggaggcctggcacgcccttgagacctatgttccccatcgcatccggaatttaggaatctccaattgtacattgcctatactccgagaattatgtacgtcgtcgcagacaactgtgaagccatcagtggtacagaacaggttctacgaggatactctgtttgatgtccccctgcgcgcgttctgccgcgagaatcaggtcatctaccaaagcttttggactttgacagcaaatccggacctcgttcgctctgagccagtgcagaaacttgctcgccatgttaagataactccggctgctgctttttatactctggttatgggcttgaaggatgtggcggtgctgaatgggaccaagaatgagtcgcgcatgaaggaagacttgtctgctcctaaacaggtcgaggatttcacacggaagcaacctgagttatggcaacagattttgacggaattccggggtttgataggggaatctagttgcatataaaaacttgagcaagccgtgtcaaggcttctgcggggaacagttagtgctcaatggtagtgcttactgcaaaaatcaaataatcgagtagatgtaagtatgaaatggcatcttgaaattgcaattgtgaactctaggctcacgatcctgagatagcgaccagttcatctgtactgatacctgacagacacgcgcgatcacatggcaaaatgaggtacttgtaagtactcgtcaccacttatcttgctgactcagtcaacgccatccgtggccggaccggggcaacttggatttgccgccgagtggcatgagggttcatatttatcttgttgacaatatagctgcattcgtttgattttctcttggtcttcctaccttgtgcctctagagctaaatacttgccatatcaactcattcaccgcccagtgggcgctttctgctgcagcctcccgccttattctggatgttggacaattcacgcgcccattgagcatcatctgcctagtattgatcactgctggtccttgatttgccgcctgctatcgattcctgtgatccttcgtttacttcagtgtcgatacgacaaatttcgcgctctgctcagtgttatccactttttccacctctcgcttctgtggtcaaagccgtcgactcaaattagaaccgacttggatgaaaaacttcctgcatactgagttcgcttccggttcctttgtctcctaggcaaatttcctgcggccaactcagtctcctattcagagactaaagaaaatcgagatacaattctatatcgaaccccaccgcgataagagtcattacgccagcttcttcacgatgagctcgcaaggaatgacccgcaagagaccagcaccgggaacagtaccgcccgtccatcctcagatgaaccctgtaccgaactttccgaccactgcgaaccccgggtctcagctctcgaacgatcaattcttacaatggggccagaacccccccgtcaatgccatcaatacctccgccttctctgatcccacctacaaccccgtggccttttcctcaccgcaggatgtctctgcacctgctgcgacagcatccaatcaactcgcccgccgacaagcgaaccaggtggtcagccgaaatcgtggctacgagcaacctcctgcttcatatgtggaaaatggaggcaacaatggaaatggggagagtggcgcatggggggagtctctagaggagctctatcggcgagccttaactgcgaagagagattcacaggcaaaacgaaagcaaatcccgccatttgtacaaaaattgagcaggtatgatccgacctatcgctttgtgatcaattatagggctaacgaatgatcgcagtttcctagatgaatctaagaatacggaactgattcgatggtctgatgatggcaattccttcgtcgtcctagacgaagatgaatttgcgagaacattgattcccgagctcttcaaacacaataactacgcctcatttgtccgacagctgaacatgtacggctttcacaagaaggtcggactttccgataattcaatgcgcgccagcgagcggaaaaacaagagtcccagcgaatacgccaacccctatttcaaacgaggccaccctgatttgctatggctcatccagaagccaaagaacgctgggggtggcggacatgcgagcaaacctagcaagggcggcacgcgcgtgaaaacggaggatattgaagataacgagatggacgattatgtcgaagagggtgcaccggcccctcgcgatacccgtgctccccgaccacagcaattgtcattagccacagacagctcagtacccaatgatcaactttctggagtgtatcgcgaacttcaggcgattcgtcaacagcagtcaatcatctcaactacaatcaccaggctgcggaaagaacacgagcaactctatgcgcaggcagccaacttccaagagcaacacactcgccatgagaactccatcaatgccattttaacattccttgcaaccgtgtataaccgcagtttgcagggggagggcgggccacaaaatctcgccaattcttttgcgggagccatctcgcaggaccaaggaaacatcgtggatgttgatgatgactaccttaacaatgctctaggatcaatggctagcccgagtgcccagagaacaatgaagaagccgccgctacttttgaaggctccgcccgcagcgcacgcgtataataatcgaccctcaacaatttcaccgtcaggcagtggctcctatgacacgcggtctcgtggtcatgctcggcaacccagcgccaaccagcacggccatgtggaggaggtgtttgaccacagcccacgtactgcaaacgtttctccgggacagccgacagaccagaattcccctcaacgggacattatgtctgtaatccaaaattccaatgcacgcaatgggctctcaacaaacttctccgagttccccaatgtgctctcctccctggaaaaccacggtggtaatgttcccctcacggcaaatcaacgcgccgatatgcttcgactcatggccaacgaaacaaattcatcagaacccaacgctggcgtatcgcccaacaacgcgcttatctcgccgaatccaccccttatgccgcacaactactcgggcaggctagccagcacacgacaagaaatcgacaacctagtcaagatgcaagctgagcaggatcgttctgtccagaacttgactagtcttctccagccgctgagcccgaatggcaccatccccggtatcgatagtgagggcaatgtacctcctccgccgctcgaccttgaccaaatcttcaacaacgactatttcaccgacattggagacacagggtccgatatgaagaaacaggagaatccaatggaccatttgggggcaggccagaatacacacgatcctatggggaccacccaaggcgatgataccaacgacctgttcgatttcgatcacatccctaccgagcctgatctttttgaaacccctcataatgcgcagggtgatcccacctacaactatggttttgacggtgttggatacgatgaatctgggcgtgtgatcgagcagctgacggatagcgaaaccaccagccccacagccacgggaaattcaagcgaagctgtaaatgatggtggtagtgcgtcgaaacggcgcagaaaggcgtgattctgccgatagcatgaggaagatcagaacggagcagattcacaaccacggtgtggatgtggacaaaactttcggcgattaggcgtttttcttgttgatatgaggtttcacatacctggagatgtgactaggctgtaaaaacctatgatgatccatgaatgaaccaattcctggaattttaatgagatacctttgctttaccttcttcttccttaatgagtttaatgtacataggtagaggtctttccagaacttttcggaaccctcgctcctccctttttttctcccagttgcttcatcatcttatgagtccatcgagcactgactttctacaaaacatgtgccatattgtgccaacggttgatcacgagatctggtttgcctttccacgcccttcgaagctccaatctatcctcaccttcactcctagctcattagcaaaaacacgaaccaagccagggttctgctggaaccaacgcctagcctgcactgcatcaatgccaggttgcaccagcttctcgaccagaggccccgtttcaatcccgccgacagccgttatccatagcttgtcgcccacggctttcttgacctccttggccaaatgcacctggtaggcagggcccggtttgatagcaatcgcgaacttgtcttgggatggatgccgcctgagctgatattcaccaagtcaatgccacattcggctaagagtgggacgagttgaaccgattgaggctgtccagctctcgggaaagtctttcttcaattcatcgttactgaattcgaaccaatcagtcgcactaattctgatcatatagaggcattgcttccgggatgctagcgcaaattgcctccaaaacttctagcagtagtccgattctgttaacgcttccattaaattagcggagcactggttcagtagtgttatgcactgatcacaccagaggcgtgaccacaccagaggcgttgttgtaaaacgtaagcctgtggcatcaccgtccctctattattctcctcccaaatcttcaactcgaatctctgacttcaaccctctaactccctcgctaactaactctgtaattgacttgcaaatgcctccgcgtcgccctcgaccaaagctctctctgtgggtccgttttcgaagatggcttcgctactggagctcacctctccggctacgcggtagtctcattcgactcaaacaccaacacaaataccccatactgacgctccttcgcttgttcattccctatccgtcctggtacttcccgatcccggaacgattttctcttcgcgaattgattgaagacgaagaaaatgggacggggataatctcttcccattttggcgccatacataatcttcgctgtattccgatctggcgaatgcgggacacgccattacggtctatttaccggctctacgagctccatctcgcggatcggtatgagctgatgggctatgaaaccgagtatttctttttccagagaaactggaagcttggagatataccagacccgagagatcctgatccgcttcgttatgcgatggtcgcttcgatcacggaaaaactacacgaagcagtcaactggaggttgagcctcggtctgcggagaaatcgggagcacgtctgtcgggaggaggacggagacccatggcctcctttcatccctgaagaactgccagactggacgaaaagtgtgccgcctatggataaagatctattgagacgctcagtaccatcagagtcactggatgccgaggggaatctggtgctcgagaagaatggcaaaggccctaattttgcacggcgcaatatcatcaccaacacaggttggttctatacaatctaagagcacacttgaacagttgtcatatcaatcatcaacttcatgggtcgaattcaattgaatcagcgagcgctagcatccgtgacatcctctttgaagatatcctcgtcatattcacgacgttgggcgtcagccacttgatgcattgtcctatagtcgggaatcacgtcgaacccgttcatattcattgtctggatggtctccaaatccagcgggccattatttcgggttctcggttgcttcaaaagagcaactgcatccgtcagatctagatccgcctttcggtctcgcttcgcagcatatatcctcctcaatttgcgctccagggcccattcaatcggagcggccaaaatttcgaggttttctcctttgaacagcgttatgtcctgtttctcggctagttcaaacaaggtctgtcgagtcttcttcgttacgaagatagctacggcttcgttgatccagtcagtggggaagtgtagtttctctgccacagacatgacagcctcatggaaagcattctgtatctccttgtcatcggcaaactcgggatcgatcagataatcgacatcgcctgtgctctcgcgattcttgagataggacaccgcaaggaacccacccgcactgatcagtcggatgggcgcgaatgcaatgagccagtcatcgcgacccattgcactatcgagtgctagaaggcctttttcttttcgtaaagttggcgccaaagacagcctctgtatagtactgtttttgggtgtatcttaccctcttcaaaattcttcgaatcgagatatttctttcgatcagtcatgatggacactgattgaaaaaacgagaagaaatatgagtttagccgatgagatcgaaaaatggacaggagatgagatttatatggcagaagccttccaaggttagaaccccatacatcgtcattatggtgtgttgctttcaatcatcattggacacatgggatacaggatgcaacgaagctgcgaggcgaacagaataaccaatcccaggagtccctggagatgcgcgtgtcttgaaactgcctttttgtaacgttggaagacgccggcacttacctgcagggcatgtagcgtctggctaataatatccgacaagtaagattctagtacatatgtgggatcaggatattgataggctaatatggaaagacttgatattgagagaaaaagatcattcagcgccccttatcccattccaaatcaccgactcgctctcgtttacgctcgcgctctctgtcgcgttggaatccccgctttcgcccaaccacttccttctcgcgctcgcgaggatcaatcaccataagtgaatctgcctcacctccatgctcgcgcttccagttcaagtctttgcctagggtatctttcccaaaccggagttcatgcgagagccaaccgccgtcttgctgttcggggtcgtccgcctctgcctcggggtcatcccatgcctggcaggattggcagtttgcaatgaagtgcaggtcgcagagttgggcctcttcgtcttcttcgtctttcttttgattttcggtgtctttgtcgatgtgacttttgctatgtgatggtgtggcagttggttcgggtttggctccttcgagcttggctttgaaggcgttaaagagctgcaatgcttctcgttcagcggcgctactaggtcctgtcccgttacgactggaaccatttgcggttcctggaggtggccgtttccgtcctcggatggaggtctcagggatcatggcttcgagtgcagacttctttcggcctgtgtccttaggaaccaggtcaacgtcgcggcgcattgacgccatcagagcggcaatctgagcgtttgtccgcgacagcttggactcctttgcgggtggggcgtccggggtcggagaccgagtaggcgactcagggtcaggcagggggagttgtgtttctggatctggtgtcgttgggcgccttttacgctcggtagatggcgatctatctagagatggcgaccggggccgtttgcgcggctgtgatggagcatctgctcggggtttggggcttgatgcgtcgggctttgcacctggcgcatctacgaccaaattggtgttgaatttcggcttcgctgggcgcatgggtatttcttcgtctccatcgtctccaaagctcagaagcgtcttcccgcctttgggtcccttcttctttttcttgggtgcacctttatccgccttcccggcagttgagactgtctttctgtcctttaatttgccctccaaaggccccagttctccaacctcgcaggatgtcaccttaatcggataaacaggacgctcggtgcccgcaatgcgctcggcgtctgcaatcttcaacacattgtagatactgtccccttccagtctcccaaaaattgtacattgcccattcatctcacgctccgtgtttgctagcgtgatgaaaaattgactgccgtatgtcccgtcctcgctcttggccattcctagcaagccacgtcggttgaaacgtaaccgactgtgtagctcatcgcgtagaacgacgcgctcatgcgggtcccgagcttcaggatcaaactcgaattccgggtattcatagatagaagttccgccggagccagtgccggtgggatcaccgccctggatcacaaaatcgggggccacccggtgaaagattgtgccggcatagtagttgtccttgcagtgctgaaggaagtttttgcaggtgagaggggcctggtttgcgaagagcgcgagctggatggggccaaccgttgtgttgagcgtcgcagacgcagtgggattgggctcgctggcgtattgggtggacatgatgggcaagtaagctaccggtttacggcgcgtgccacaagtgaggtagcctgaggatttggagtgtattcggggatagggacaccctcttatagtgttgcgattcaatgtgttggtttctccgatcaaaagctcggagggaacgtcatggcacgtgacgttgatctagcccttatttacttggtgtctaaggacagttttaggaacataaaactaactgaacaaggaatgagcatcatttcttttgacttcagcactacgtgacacatttcgcacatttcctgcagtatcggaatgagaccccaaagcacctatgcctggctaggcagcatgggatgggagtttgagcgttgggcatggaattttgtcgcatttgggaatgatcaatagcagagggggccaagacattttcgggtgggtattttgatttgctggtgggcatgtcgagcgcatgctgaggattatcaggattgaatgtttggcagtgggtgctgtaggtggttgaatgatccgaggaagatccactcccggctcaccgagtcgtcagtccgagatcttgctttgtgaggagatatttgtcgttggcaaatgtcttttttcagttgggcagtcgaagcttgcgtcagccattgagaggctaatcttggaaggacatgtcggctagatgggatccaagaaaatggtggagacttgggatcatcattaccggagtgttgataaagatcgagatgaacggccgtaggtaagtcgcatggggagtggtccagtattgtcgcgtagggtaagattactgataatcgtggtgatttatcgcgtgggatattgcttgatggaacccaacggaagctcaagcttcagttccagcaagtcagattcacaccggccgtcccctccgcccggggttgtggaacaatcatctgcttctgcgtctggtcctgttcctggtgctgctcttgatccgaagccctagcatgaaggcctaacttgaaccgcagacggcgcaaagtgcgttcggagatagcgtaaccttctttctgcaacatgttgagcatggctttatcggtcagcctatcctgtataaaaagcatcttaatgcgcgcatgcaaagcctcgtcgcctgtcgtcgtctggtgtcgcttgcggatgccccatttgcgaaggcgggactggatggttcgttccttgacttggatattgtgacaactttcgagggtacggctgatagagtcgctactgatgccatggtggtacagagtaatgatatcatcccggtagggttctaaattgatttgttggcgaggcattctggggttaagaagagaagagaaatgcgaagagaagagagttggggagtttcgagttgttgacccaaggcggtgaatctgcggaatagtcacttgtcttgatctggatatcgtgatgtttttcgatgttttcgaggtgagacagatgtgattgaaattactattatgctcattggcttggccagggacctgaaactgcaaatcgaaagaaattggatcagatacgcttcacggaacatcccgatacgattacatactactctaggctctcagatgtcatggattgtatagtgcgaaaaacagattcaacttattattgcatttcatagattcattacgcattgcaatcttaccaagcaagtcacaatctcgggattcacccattgatctgatccattcggagaaaccaacaattcaaacctttttacccgcctccatcacagacgagctcatgacttcagggctaggactagccttgttccgctttgcaatgcggaagccaccaagtaggaagaagatagcctgcagaccaagaatcactgcgagggtaaccatggcaccaatgacgcccgccacagcgagtgacattcccgagccaccagtgctagaggtactagcagagccggagtcgctgctggtgctgtccgaactggcgcacttgccgtcggtgttgccacacatggtacaccactcgtcatcggaagtaacggcgatcgccttggtcttcgaggcaaagtcgtcccaggaaagaagctcgcttgattgaccgtacaatgggtatacggtaggctcagaggaaccggttatggtaccattgtggaacatgaagcgcacgctcaggtcggacttgtcagttgggaagtcggtgccactggcattggtcaccagctcgaagaccattgacgaggcgtagtccgggattccggtgaagttgacggatgcagcaggcatctgcaaaagaccgaaaagggagaagatggtgccataggagccgaatccgatgctcagcttggacgtgcccttggtagtgatggtttcgttaagtccggccaggatttcgcctgccagaacggcgccgtcgatggcgcgcactttatcggaggagttataagccaggttgaattcatggcttccagctagagcaatgagctgatgatatacctcgtcggtcaggtctgacttgtgagggaattgactggtagagttatggatgttgccaacgttcaagtagtcgaagatggtataggcgttcttgaatgtcatatcagacgaggcaaatgtactgtccagcataggcgaaagcgattggtagaactccttggttgaggatagcagcgaggtgtagatttcggagaaaaagtagttgttgctgctcacggtggccttctggcatccactggagccttgcaaccaggtggaatcctcggcgttcttgcttgtagtggcaggtatcagctgaatgagctggtagccgtttaatggtgcctcgaccgaggttccattggccagggtctgggaagccacttttcccacggggggatagacgccctgtaggaagccagtggcagagttctgcagcacagtatccgagggagcagaggcactgatctgctttgggttgaccacatcggcactaatgccctcgatctgcttggaagagttcgacaagatgtatcgctcgttgtaaaaagaaccggtctcaaagacctcccgatagcccaggtcggtcaattgagtactacccaagacctttggcgtgcgatctccatggcgggcgaaaatatacgcacccaatacacgctcagcatcaacaacgggggacaaagatgcagccagtaaaaggccagactggatagagtaccgcatcgtgaaatattgggagtaaacaagaaattaagaagcagcaaaatctgcgggggtttaccttctttatctagtcgtggatgtcaatgtcaagctattgcgggcaagaccccttgactcttccgatttttcgctttttttttcgcttcgagacccttgcgattgtaagcttggaagcggggaaagaagataagtccctgcagtgtctgagaatagtctagtggacgaatctcaccaagtcattggttaatacggagtctgaagggagtcaacaaataatcattagctaattcttgggaaacattgcatctccgcggtaccgcggagctatgatagcgtatccatacatagatagagaagaattgacctataacagataataaaaccgttgactgcttactaggtattaaatatgattctcagatcgaatttgcggatattcggatattcttgttcctgttcgcgctccagactccatccagtacccagattgtacatttatatcgtgacataaaattcagagaaggttcagatcgtatcgctggtccttatgccgtcgtgacacccttggcacccattaattcacatccatttcgaactacaccgacgagccctccagtctgaatggcttcagaaccaccccctgcaagtcgccattcaatctcggccagtccttcaagccacgtgatacgtgtttgggcgggaacttcgagctgctggagttgatctgctagcgcggaaaggatgtcggccaaagccagacccttggtggactttagggtttgcacggtgttcagacaggaagtgacatcgctagtggagaggatggtagacatgatttcttggatatcggacgggtgcggcgcggcaatgcagtcataaatcgtcgcattggtgacaatttcgggctccggacgaggggctttcggggcgtctctcatcggcagcgggatacctaaaagataacattagacaattaggatgaaggtgaccaaggagagaaaggacatgagcttactgctggcaaagcatgcctgaagcacgtttagggctcgtcgcatatcacctttgctcagggtcactagactgtcgaccgcatcgggctgtatcctgacaccctcgttctcaatcactttgtcgaccaaactccgaatatcggcttccttcagtggactgaaccggaatcgagtacaccgcgacaggagtgccggggacagcttatgtgtgtagttggcaatgacgcagaatcgggtattggccgtgtagcgctccataatacggcggagagccatttgtgcggtcgacgtcatcgcatcggcttcgtccagaatgataagcttaaaacccgccagaggggagccgggagtgccttggggggccatggtgaagatctgtttggtgcctgttcgtattcacggtaagcttgtagttcataactcgagactcctagagcacgaacttgcaaaggtcttgatttgttctcggacaacttcaataccacgatcatcacttgcatttagctccaaaaccatctgtcgcatgttcttggtgccgtagattcgccgcgccagggccaggatggtagaggtctttccggttcctggtggtccatagaggaggagatgaggcaatcgctggacgagaatgttaatcagaggctatcgtacatccggcatcgtaggcattcgttacgtttgtctccacgaaccgattgatagtcgcgaggatgtcttgatggccagagacatcatccaggctgcttggtcggtatttctcgaccctgggaagggtattagtgatataacacaatcgaagcaattcctaaaactcaccatggcaaattatcttgagcttcgactggcagatcagcgacattcctcttttttccactggcgttgtcggagctaaattgcacgtccttgggcgcatccacgtccatttcatcctcgtaatccgacatagtgaatgtctctctcttgggtagagataaatgatcaatatcaacaggcctatcaagagcaggtaaaccgtgaaaagtgcccaaaaggtttgacgcgtggagcgcgtaaagaggctcggggcggaaaatcatggagcttgggaactccacagatgacatccctctgcctaacctccaacgggtcaacttgtcccctccgcggtctctttgattgaacctcctacgttttaatcatttgacgctttcaaaatgcctgtatgttccctacctttgtatttgtccaaagcctgttgttaaccctcaatgcaggcataccactccatcttcctggaagaccgcgatgtccccgtgataggtaggagactcctatcaagtctacacagagttcccgagctacaaatcgacatttcaaggaccaaattgaccatcgaatttctcctgactaggaaactttcccattcttcccctccgaacccgtactcgcggccccgcatacacattgcccccgcttcctaacaccgacgacctcgatgtgtcgcccgaaagtgaatcatatgattgtgtcgatgagatcctatcgctcttccgtgccaatgtcttgttccgcaacttcgagatcaacggccccgcagaccgcatgctcatttacgggactctgtttattagcgactgcctcggaaaggtcaagccaactatgactgcccgtgaggcggagaaggtaaattttgatgctatatatcaaaagcctgatataacagaatgatcattgacaatcgtattcctaggccctgaccaacgccgccctcgacagctttgctattcccggcgatgtgtcgttcccccttaaccaggcctttgaacccccgcgtgaccgccaggatgccgagacgcttcgccagtgagattcttgatgctatacattgcaactcaatatcagctaaccggttcttgcttccaggtttatctcgcaggtgcgacaggagatcgccatccgcctacacgctagattataccccggtggtgtcgggccatcaaaggtaagaggaaggaaagaatagactcctcgatatctaccaaatactgaccaactctagttctggctgagtttcacgaagagaaagttcatggggaagagtctctagacgacgagcgttgctgtatattgtttgatgaaattcagcgcatgaatgaatttgatacttgattcaaaatcacaccaagcgctttgcgtaacttccagaggcttggatgggtctacttgcatatctgggagtcaaaattgccctcggactagcccttactcgatgtccaaagaaagggtagcagctagagcaagtcggatcacacgaaagatcagaagtaagttgttgtaattgtacattaaaatgctattggaggctattttgagggcgttcattcgtgaaacctaggacgtcatctccacatctcgatcactgatcggggtagatgtcgtttccacctttcgtctcttacgaacattcccagcagcctggatattctgggtggtagggaacacgcgaacgccatggaagagatatccctctgcgccaccacgtccagtcatgaggggatgggtccgaccgggcagtacttgccaagggcgcacacgcgacgtttgcaaggtaggtggaagaagaatcgtcggatcaaccacaaattcttcatggagtgaggataaatcaacggcctctccttcgggactctgcgactccaattctcgctttttgttgataaatgcggtcctccgagcagtggagtacatgtctgtcaattcaaccagagactcgactgtcggagaatatacgacaacaggggcagaccctgcaaggagcgggaccatcgtcttaaggacgcttgctggctctagcaaggtggagacgatcagaccgtcaaagttaccggctcggccctcgtccaccactgctttaactcgcccccatcggttgcgcttgtggtaatacgcagtgcgcttgctttgtttaagctccgccaattcctctgcaggtatgatgggtggttcgttggcgtagagcggatcggaattggggtcagccaactgcatccaggaaattgatttgaggtgggtgtggagtgggtgggattcgtcagggttgttggtgtcatagccaaagaatttcaagagtgacaagttcggttgtgagtatgggtggataacggtaatggtgttggtagtagcggacattggctggggacgtatgcgccggggctttgggggttcatcggtatgttgagattctgcagcattgtgggctggaggatcttgctcctcggttgggtcttcgtcggcatcgtgaggatatagaattcccatgcgctcagccatcgcggcaacgacaagtccgccagtctcatcgacgatagcataacgtccatgcggcttcatcccctcacccacctcaacgtttccgctgtgatgtacattaccccagcacccgatgagaccgatgtgttcgtcccgtagctccattgccttttgcgcatcccgttcttcgatcagataattagcgagaaggccgacgtccagtgggaggacggtaaaccgcttcagatacttcttgcgtttccgcagcgtgtatttggcaagagagaatgcggtcttctggtctattgcgctgtgcgattccaagagctttgcgacaatgtctttccccgcgccaccggcctctcgcttcaattcttcaatttcctgtagagtcaatttttgggaagagttttcgtcattgatttgacgatttgttcgcatcggtattccattttcgccagtatccacgtcgtccccctccccatctccctctccgtccgcgaggagggtctccgcatgcaactcggttgctgacacgacacgtagttggtggccagcatcatcgcacgcatcgagaatttcaaaggtgaaatagaatgggcgtccaataatctgattggcggtaaagttaccaaatcgacccaaattgacgactctggtccaatgttagttcttgcgatggaatctttccccgcatagtgcagaaagtacttacgtatcggggataatctggatgagtcttaactgatccgactggagccggatagccacaaactggcccgggcgaatataggaatgcatgatggcgatggaacagctgtgcctcgagctcttccacaaaattgttctggggacttttatggccgatagaatgacagccaatcagaggacgagaatactccagccgggtggatagatagtccgggacattcatgcctgaaacgtatgcctgatatttatgccttaattactggcttcataccaatttcgtcattaatttccaacataccggcccataccgtactagcaccgccactccacccgttgcccctcttgcatgtgaataatacggtaaatacgcatactggcgtagcttccccaaagtcaaccagcgatcgctggtggatctgcggaatcccggtgccttgcgagaagagagacctctgagatcatcatccacctccgtcattgccttgttcaacatagctttctcttcatttagggcatggtatttccgagcacacgctaaaggctaggctgttgcccatcactcgcgtatctgcgtagacgggcacttcagcccctgccgtcccagcgcaaggcgtttttcctatactaatggcttattgttattattctgagcttacgtcctgaatcaactctcaaatcgaactacagactctttctgagtgtgttctgagtgtgtgtcgatcgacgttgagtgctttattagccttcccgttcctagaactatacgcgaactcaacccttccctctccgcttcccacaaggtcaacggaggtcttcatgggcctgcgaaaacagcccccaccgcgtctggagaacattagcaagtcaaatgttcgatcggacgcacgctcatccaagtcacccaactctgcttccttccatcgcccgattcgtttaaaccgatttccttctggggaccctatctactctcccgacctcaatacttcacctgcgtttgacctgatgccacttgaggaagcacagcggtcgcctgtggggtctcccaccagccaacccccgagctcatggccagacaataacagaagaccggaagacggccgctccggtcagtataatcagtatgagggagcatacaacgaacctgcaaataccaacggacactgggttcccccgacattgacggcaggtcaacaactaggagcggccgagaatgtgtggcggtcaacgactgatggcggtcgtgcttcgactggagagctaccggtacagctgcagtcgaataacccattcttgaagcctaggccggcagagcatactcaagatctcttggatcgcaatgagtggggacgtgattcacatgcgacttcaaacagtgacgcattgagccaatgtatggcattagttccttctgaaagttccctcagaatgatatttgttgctaacgacttgtagccgaagggtatattccgatgactgcgcggctctctcttttagatgagcccgaacaagaatccccatggaccgaggctcctcgtcctcaatccaattcccagcaacgccctgtattaggcggtcaccacctcgatgataactcaccgtgggactctcaacagtccgccaaggttccggttccccagggtgtctacctacaaggagagcagtctaatccatatgccccagcggttgcggtgcagccgtctggcctttctgattgggaaacctatgccggccaacaatataagcctccatccaattcagggagacttggatcggatgctggaatcaatactccatctgttgctctttctaatcgaacctctgctacctctcatgaactaattgattttggtgaattgagcgccactgggaattcggtgggcgagaccaggtctcctgctgcatctacggcgtactcagaacctgccgcgaacggagcaagatcattatcagaaaagcaagacctcgcagctcccgtgatacaacaactacaacaaccccaagcaagccctatactgtctcccgcagaagctgcacgacaaaaagagcaaagatcagaaacatatactattcgacacatccgatggaccgatcagagtggtcaactgctggagtccccgattttggtccaaaatcaaaacggaccttgtcctctgctagcccttataaatgcattagtgctacgagcgaaccctaacgctcacccaccaatcgttagagctctgtcaactcgcgagcaaatctctctaggtttgctaattgaggcgatgtttgaagagctgacaacatgcctgggccctgatgaggagttcccagacatcgaggccctcactcaattcctgacaatgctgcacacgggtatgaatgtcaatccacgtttgacaatggtgagtacatgcgatgtatctgtcaaatatcacttatactaacctaatgtcagaattctactgaaggatttggcactttcctcgaaaccagcgacctcggactgtatagcacgtttggtataccattgatccatggctggctagcctcatggtccagtcctacccatgctgcgatgtcacgcactgcccagtattacgaggatattcaaatgcttcccttccgcagacacgagtttgaggaacgggtggcgcggggcgaggcacttgaacctgcggaagagaatatcatggcggatatccaaaccatccagcgatttgtggaaattgagaatgcgacacaattgagcccatttggcctgacacagctctcaactaagcttacgcccggttctgtctccattcttttccgcaacgaccatttctcgacattgtataaacacccgcaatcccaccaactctacactttggttaccgatgctggctatgcgggccatgccgaggtggtttgggaatctctagtcgatgtgacaggattcaacacagaatattactcaggcgattttcgacctgtaggcgctggtccttcagctccatctggccctgatcccgcggtcctccaagcctctaatgagccagccactcattctccagaggcaaacgaaggatcgaaatcccctgagctgactcaagaacagagtgatgccgactatgcatacgcgctgtcacttcagttccaagaagaagagcgacgcgaaaatgctaggaatgagcaggctcgtgatcgtcgcacatctgcgccgagtaattcttccaatcggccattgccttcgcctcgcttgagcaatgtgcctaatcgaccattgccctcgcctcgtttgagcaatgtacccaatcgatcttcgagcattgccaatacgattggttctcggcctagtcctcagccacaacatggacccgaccctgaggacccaaatgcaccccctcctccatatgaacaagctgctgctagcgggccgcgttgttcgcctcctgacataaggccatatggccgtgccgcaggaaatcagtaccctggtaaccggaatccgcggaatcgaacctcgcagtcttctcaccgaccacgcccgcctgtacgtgcaggggatcataatatagaaacagaacggaacaaagaatgcatagtgatgtgaccaatgtaagatctggaaatgataagaggcgttgatacttgctttacgccaatgcactggatggatgaatatgatgcctacaaatgatatatactattgtagagaaagaacatgtctttgattgattcgattccagatgaaaccttaatttcttgctcctcgttatcctcattctccacggcgttatggaaattaacaaggaccttctccgtgcctctaacaggagcggggctaataagcatatatcaacaaagtgacatgtgagatagctacgtatgttcggacttgtcacggactacacctatgcccggaggttaagtaaattaaaggactcacgtgaggaagaggtttctcattggaggagtcattatccagatagccctagatcttcccccgggaaagactaaaaaagtgtgtataagctatgtattgcgatatatgccgaccatattgccctatagcctaagtcaaaggcgatttgggacgctcttatatcctgaatgatacaaccccggtccaccggcccgttgactaggatcagggcatacgtagtataaagaatgctgctatgataaaattggcctataatcatccttcacggtgctgatttccttgcgagccatcaggatctgtatatttcctctgacagtagctcttgcgatgcagattcttctttctagtgctctagccctcgttgggatggcccaggccactactgtttgcagtggaacatttagcacaatctcagctgccgagtttgtgtctaacctgcatcccggttggaatctgggaaataatcttgatgctgtccccgatgagggatcttggaataatatgccagttgtggcgtcgacagttgatactataaaggatgccggctttaggagtgtccgactgccagttacctgggcatatcatttcaccggaggctcacctaattggactgttgacccagcatggttacagcgagtctctgatgtggttgatatgattgtggctcgtggaatctacgctatcgttgatgtgcatcatggtatgatatatgatcttgtatcggagaagggcctttactgatataaaacagattcatgggtttgggctgatgctacccagtctggaaccaatcttactatgattgaagaaaaattctatagtctctggtatcaaattggaacgaagttggcctgaaaatccaacctagttgcctttgagcctatcaatgagcctccttgcaatactgcggtcgacgttaccgagtcgaacaaactgaacaacatctttctccaggctatcaatgatgctggtgggttcaactcgcaaagaattgttaatctagtcggaggtggtgaggatagcgtcaagactgcagactggtttgtagcaccctctggattttggaatccatatgctattcagttccactactacagtccctgtgggccatagatcagtttatacttcaggtataatgcgttgtgggttgaactggccgagtgggcttctagacgacttgatattcagcgcttggtaagagtatagacccagttttttttttttttttttttttttttttttttttttttttttttttttttttaaaagtttactgatttcaaacaggggaaagatcatttggggctcggggctctgacagtgacaagactactgtgcagtctgacttccagctgctgcgcaacgctttccctgatgtacctctccttttgggtgaatacgatgcttcacccaccaacaccgaacccgctgcccgatataagtaccttgacttcttgatcaagactgcagccagtctcgatatctcctgcgtgttgtggaataacggattggaccacttggatcgaaccgcaggagtctggcgtgactgtaactcactctcgatcatcacaaaatcaaccgagtctactgccaatagtttaccagatagtaccgaggacgcttctgcaaccacacattcataatcagcttatattttccatcagtatggaacagttgtgacagcacaaactcttccatttatcttcaacggtaacaccctctcgtcaatcagtgactccacttgctcggcattgtcgttgggaacagactattctgtttcgggtgcaaatataatattcacagcttcgtacttatccaagcatctttcatctacgacaacaccgggtattattgccactctaacgctgagattctcggggggcgattcgtcccctgctgtccaaattgttcaatggaaagccccaactctgtcgtccacatcggcggtggcttcgactgtctctggctctgccctatcaattccaatcacatggggcggactatcaaccgtcgctgcattaaaggccttgaccaagagtggaacatacctggtcgatgactggacggtatcactgagccctatccagcaagcgagagttgtaagccaagccctatttctctttgtgtaccatttactaatactactaatatatcgatctagacctacagcaaccagtataactgggatgactccaatgtaatcctcacttcatctgctattagctgtcatctctgctggccaatcgaccgtgttcaccttcgagtttttcccacgggataatggtgctgtgaatgccgtcaactttaccttgactgtttgataggatttatacctcgatcatgatagttgtactgaagaaatagttcaattatattataagtattatcaggctttgcttagcagcctaggtatcgaatatcagcatttatgtacaaaaaaaaggtaaaccatcgctgtcatcaagtcattaaattccatggcagatagctaaaatcaatacaagatttttaattcccgtaaaggaagatgagggtcatatttgtcccaaacgatcttgttcttctcattcaggtgtgcgccctcatccgtgatgctgattactggatctgtctccagaacctcatggttactgaaaccccacttatcgcgtgggatccacagagttggtggtggcgatgctacacatggctcgaaatatgctgtacgcatctcttcgggtgtgtaggaaaccccctcaacattgcggcgaatcttttgacgcaatgccgcataatctttgtatacgtttggatggaaccatttccagaaggccatagcgcgtgggcggcgctcttcgttgatcgctgccacttcgtcttctttctcttggagcatttcctcttctgcgtcaagggatcgtggtaagaaactattcagcggggcgagtgcatcgttgagcgacatgtgtgccagtatgttgccgaccatgaatagagccatgattatgactgggccaatagcgcccttaatagcgcagagtccaatcaagcaaatctcagccaggtagagacctgttaacaaatgttgcagggctcgtgggtagactagtcccttggtgtcgacttggatgtcatatacgaagaggaagttgtatcggtaggcttggtatacaagataaagcccgaggaaagcaaatcccagaatcagaggtgcgatgcatgaataggtcaatgctaaaaagtcgagtcagttcatcttcgttaaagaatgagtcctggtatagggtattacttaccaattacagccatgttggtgaagatggggaagacattgccccagctgatgctagcaagttcgacccatccttgaaacagacgacgtggggagtaggcaaagaatgtggtgacaaatttgaacaccaaggcgctgacaatttgaacaagggccagggaactcatgctcaatccttgcagcatgaagtaagaaatgtagaaattggtcgccttgggtaagttctgcgccagcagatccttgaccgagagaggatccttgacaatctgtgcggtagctgccgacgcagccgatgtcaaggtcgtgaccaagaacacttgaaccacttgaaatacaaagtgagcgctttgtgtgaacagctcaactcgtgcccttgatgggactccggctcgtctagcgcatactaggtagaagtcagcaggaattcaagcaacaaagagaatccggagagcgtactacgacaaatgatcggcactagtgacatcaacgccgctagtgatgcggcaggcagaagaccctcaattgctccttttatgaaatcaggcaagtcaagaatgaagctgaggaagggaatgatcctgcagatgtatgtgatgttcgaaattgcaccgacgattgccgcaggaaatgaccaaaagatgaccatcgctgccaggaatccctggactgcgaatctcctcacgattctttgccaccagctcagattcagtgccgaccatacaacctcgcgaggtgagattccaataaagcgaggcgtcatgtgaaatggttggtgatgcgacagggtttgtagcgcgacttgtgcatcggcctggctgttgaattcgacaaagattgcactgagctgttttgcttcaccattttggtgttttgcttgcaggtttgctacttcttcggttttctttgccagctgagcccgataccagtgaatagagtcgaccttttcaccaaagaacttcggtcgatgcatcggacgtttgaccttgtgagaccatgccgggttgcttgactcgcagtccaggcacatgtcaatattcaattcgcctgttttgattgcttgggttcggattttattcgctcgccgaatgagcttggtctctgcggtttccaacttctcggctagtcgatctcgttcactaaccatcttcttcaattttgtgcagtcggaggtgatccaggttcggcggatggagtcaccaaatacttgtcgtagtttattttggttcttgtaagcgtccggaactgacatgaagaggactgtacgggacgacattcgagatgcgtaggcaggcgagttgaggtaggcctggcggaggtttgcataatacagactttctctaaccacgacataaaacacgaaggctatatattcttgtcagtccagctgtgttgcgagtgaagatacggacaactgactgaagtaaacacatgccactatagcattggcatagtatctgctggggttcttgacgttactgaaactcaagatgtcgagctcggtattgccgttacccccagtagcatgcagaggcagcagaatcggccatgtaatcacacaacctgtcagacatgtcgcagccaagacgcgcaaaaatcgcaagaaaagataaccgtctagcgatgagtggtggagcacatgattatcttcaatttttaaaaatgtcccgagccagttaacccagccagaaggcaactcgggactccgttgatgctcgtgtatatctggtaagtaggatctcggagcgtaccagcgacgctgagttcgacgaaagatcagaaataggctgacccaaaatatagcgtatacaagtgcaggcaatagagtcatcatcagggccgagcccgatgagcccccttcgccggtgagactgctggcgatatcaccggaggtggtggacgcgttgcctcgcgacgatccaatatttgtgtcattatcctggatcacattagcacggatttcagtatatggggtttagatgggaggcataccgttatacttgacatggtgagtatcgtctccgagttgagaaacaaagagatgtacaagccaaggaaataatgacaggaaagagggggctatatggagttcgaagtaaattccccgtcaaaaagaagcaaagagaaaaagcaatgctctttgcatggtccccgcttgcgacctgtcatccacagcgatccacaatggatatagacaaatgggtgagattcgtgaaattcgtgcatgtacgagctgataggtcagccctgaagatttgatcccaaagccgaggtgtcgtcgatccgatagtgtgtgggtcttttttgccttggcgaagatgtgaagtatgtgctctatgtatgtgtcagatggaatttcaggaaatatcaaactcgtgagagatctagcatttacatacctttcgtttgtgcagaagaaaaaaaaaaaaacaaaagacggaaaagtaacgagagagaggaacgaaacccagccgatgcgggtcttccaatcaaaaactattcggccgatccccgctgatcgagaaaaaacccctgaatgagatgagaactttgaagatttggagttcatgcaggttgtggaccaatagacctattgatcttatgaagcgtagtatatggaccattctaccctcccaagacttcgcttggagagacttttcggctcccctcttgttcccctcaatgggcttgagcaatgcaaggggcccttctggcggtggaggctggacgcatgggattacagcacatggggaatgttgagtctggatccctgtgaagtgtcaaaagatgcatcatgcagagaaaccggtatactcacgtggggtggttcgagattatcggctacggatctcactggaaatggcttctagatagatggtatggtagacagtcgaaagaggcttcgatatacgtattacttgtatcacttagatcaaggtgatgtacctagaccgtacttcgtatatgtacctcgactgcagactgtagtacaacacagaggagaaacgtgcaggtcttggcatatgcacatagggatcactcaacattctcagtcctttccagtcttcctttttcagagcccttacttgatctaaaatctatagccaaccttgaaaaggttacactacattcggggtccatctaagcctggacacaaaatatatatccaaatatccggatggtcaagcgggaacatatatggagatgcatcatgcgcaagttccgatgggggagatgggtgacgcatgggatgttgccaatgtgacgctttcctggttagtgacgagacgtaatatatcactaggaactcatcgtggacgagggcatgattcgaaatattggaaatagaaccttcccgataaattgcgcagagatgttgaagaatcggaacgattatatgtctatatacaacatcttcaaactaaaacttcagctcttaggttcacgattctccttggagacaggcaggaatttggtgtgtgaacccttcgaaaccaacgggcccacttcatcgtcgacgactcgagatattttgacggtcgtgaaggccattgacttccccacccgatcagcaacggcagaaatatccagagtatctccaacggtagccgttgacaggtatgaaacgtggatatcaatgcttgcgcctgttctctcatatccatgtgtggctatcgccatgcccccggcccaatcgatgatggtcgcagagacagccccgtgaatggtgcccctggaattgacatgttccgctgtgagtttaagtcgagcctgcacctggccgcggatggcactgatgatatcgacatcggatagaagaagacggtagataggactgtcatttttggtccgcttccaaatcccgcgcacatgctctaattcggtgccattcatcgtgggtgagtacggaaatcaagttgggaggatgaggatatggtcaagaacacagggctgacgaatgtgtagactttttgaagtcggaagtcagagtcggaggggccgagagcggaatgggccgcctttgcacggaacataccgaccatgttcttctggaaatagggagagttcttgtcactgaagtctgccctggatacattgataaactatccgagaccaacattggcaccctagtctcggtgctggcttgaaccgagctttatgacgaactggagatcttgcacgcccaaactacacttgaaagtgggaatactgacgagtgcatcgacgaagacaagatattgacaaaagaatcctgaagagatccaggctctaacgcatggcgttgatgtcaagctacgttatatggaggaagtgtggcacctagctgcaaatgtttaggtagtattggagatctcgtggtgccttctccgggatcaagcatcgacttcatctttctgatgattcacattcttcaagtaacgtctgtcataaatcttggcggtgtgtagcctacaacataccgtcgtggagtgtggcatccctgggagaccgacatagggcggtgaatctggtgatgattgcagaaaaaggggagataccaacaacacaaactcgtcgtcatttcgcaaatggagaagtcaacaaggacgttcaattcgtctttagaggccaaacagcccttcccgcctctgttggctgaagaccatatatccccagaagaatcgcaagagagttatgaagacgagagtatcacctcccccggctatgaggagattgaggtggatgacgatgcagatttccagtcgcactactcgttagatcaatcgttctccgatacagactccgatgaatcttccaatattgagcgaaaccacccatttcgccagtcctccggctctctctatggccccaatgcatttgcgcctccattctacaatcgtccacccacccctctaccgccctcaccatccctcacttctcttcttcggccgcccttctcgactactacatcacgcccaactactccggacagttcagatgtcgagactcccaacgataccgaggcggcagtcgccaagtcagctcgtcgcgcaaccaccgttccgcgcgccagccccaaggtccccacctatgaatactatggcttcgtattatacctagcttcgtccttggccttttgtaagtctgacgaaaacttgccggggcagttcctcgtagtctcctgcacactaaccgggtcaacttagtgttttatctcctatggtcttatctcccatcaccgttcctccaccagctaggcatctactattatcccaaccgttggtggtcgctggcgatccctgcatggttggtgatgttacttatctacatttatgctgcgcttgccacgtataatacaggctaccttactttgcccatgcacagcatcgagaacattgttgatgaggtcgcgaatgtatcggtgattgacggaaaggcacggagacgtcccggtggtgctaccaagatgaagcctggtgctacctcctatcagatcatgggcccccaaaatcgcaaggtcaattggcgagaaatttggagtgagggaactgacgccgtcatggacgtgccggtagggggcgtgtgtgaggttttgtatggccaggatcgagaagaagactttgactatccggctgcagactcatagcttctcggttcaatcaattcccttgccaattcaggctgataactgcaaaatactccgtattgatttcagtgttcctgtctacttcgatccacctgggaaatgacgtcgagttagaaatcaaatagcacgtgactagcagtgtctggcccccttccgccctccgcctaactgcccatatctccaaagccgactgttgagagaataatttcacaatgtcagcagaacggccctcaacaccaccttcgcagcccaagggctgggaagcaggacagcttccccgcgctcctatcactccagaacaacaacggaggatggtaggttccctccaagcttgcgccatggtcagcccgaactaatcagtcttactgataggaaatcagtcgcatgaaagctaaagcccttcgggagaaacgtgaagccgaactatctcaagccggtccaaatgactccaagtcggtgacaggcatcaagcgctcgttcacctcgatggcggcatccagccaacctgctaatatgcgcgatgcatcttcttcgaatcgcccactagactcgattaagccagcccgaaatttcacaagctacgtcgactatgattttagcaagatgaccgacacaaagggtgggtttttgacacaggaggatgacccgttcaataaacaactgcacgtgcccgatgggaaagaacaaaagccagcacatatgacgcagaaagaatgggaacgcgatcagatactccagtcactgaagcgaaatcgggagggaccctttgaaccaggtctcagtgtcctagatgataaaagcaagcagaagacatgtcgtgaatgtggcagtatcgaaattgattggaaatgggaagaggaacttaaatgctgcatctgccatacttgcaaggagaagcacccagagaaatacagtttgttgaccaagacggaagccaaagaagattatctcttgacagatcgtgagtgcctaatcacctatgaaaagagagatgtgctaatcagcccgcgcacagctgaactccgagacgaagagcttcttccacgcctcgagcgtccgaatccacacaaatctacatggaacagcatgatgttgtatctacgataccaggtcgaagaatatgcgttttccgacaagaaatggggctcaacggaggcgctggatgccgagtttgaacggcgagaaaatgataagaaacggcgacgggaggctaaattcaaaacgaagctgcaggagctgaagaaacgcacacgtgtggaggcctaccggcgcaatcgacaaggtgcttcaggcggagagtttggcgatgatctcggttctggacggaagcatgttcatcaatggggccgatccatcgagaatccagaaactggaattggggtcaagacgtgtgtagaatgtgggatggaggtggaagagctcgagttttagacgaccaaaataccatagcatgattgattattgtatgagaccacgatttaatttagcgcttgaacctatttgtgacttccattattcttgtgctgttgaagtataaaatgtcacatatacaccacagcagtcaaaatatatagttcccgaattagcaatcaaactcgacaccagcgatcctatcctaggtcaatctttcatacccatcaaacaatagcaacattcgaatctgcggtgcatctatgctgtggagtatatacttgcgccttgtataactagttaactaactagttaactaatgggtcatatagttggcgcctggaaatcaaggcatcaaccatcctctcaacctcgctagtcggcctgtcatgatccctgcggaacttgtcgaattggcgatcaaataagaaactacttttatattcacctttaatacaaagaccctcccaattcatccaattgcttactccagggctggaggtaacgtgcaggtcaaccttctccatctagaaggcggtcagcaccccccgaggccatcttcaccataacaaaagatcagtgaaggcacattctcatcctcataactttcctatcattgctcaaccttgctcctctcctttggatattcctcctcaggacgcctcatccacaggctgactcggcgtggaacgtggttccttgccgtcgccatcaagggacttggttcgcttattgcggatacgatttactggggtcaggagaaatcgaagctcgcacctcacacgtcacttgatttactatcggcctgattttcccatcggtacctcctgcagtgctttgacccttccgagactcgacccgtcctgtgtttgttcatgtcctggcaatctccatcagctatggctgggattggaggaatgcccggcgccatggatggttcgaatggcccacaagggacggaatacacattacagggtgagcatgaaccgactcgatttcttgaatgccattgactaatattcatctctaggtgtaatgcgcttcctacagacagaatggcaccgacacgagcgtgaccgcaatgcgtgggagattgaacgggcggagatgaagtctcgcattggtcgattggaaggtgatctgcgcacaagcaagcgcttgcatgaggcccttgggaagcatgttcgtatgatggagaccgccctgaagagggagagggagaaggtcaagaagctttcgaataacgaaaagtatgaagacgctaaggatcccaaagatgctgcacgtgaaagtgtcaacttcctgaaaggtatgtgcctcgcaattgtatgctagcacgctcggtgagatttactaactgagttattcaccagcgcatcgccccaagccgagcacggaccccaataatgacgaagagcgcgacagcgaaaatcagcatgagtgtcaaatcgaggacatagacaaagtccggggatatctgtccaaagcttcccacgaaatcgcgtaccatgttatacccgcctctcacccgccacctgacctgaacgactccgatatgtcaggccagctctatggcaattcccaactgtcgcaacagaacctggaagaggcttatcttcagcagcaacgtcagaaggcaaatcacgttatggcacgtgaaatggccttacagaaccaccaaccaatgtctaatcactactccgacaatgccatggctcgtgctcaaaaccagtatcttcctcgagatgccatggatcgacggtcaatggacccgcagcaagcccccggcacagcaattgaaagtcgaacccaagtatacgaacagggtatagtacacgatcgcccaaaccaggcacacgagacccagggccctcgagtgatcgtcaaggaggatgtgaatttggaaaacttgaccgaggaaagaacagaggatgtggatgggtggaattttgacgaaccggcggagcaagaactcgtggccaccgaaaccgtcccgcctcatcgcccggataccgatgctttcccaaatgccaactttacgtactctgagtcgaccaaggacgggtctttccctcaccggacgaagagcacggaatcaagtcgtaagagcgatggtgcaattgatgcccgggaagcgggtacgacgttcaaacaaaagcaagattccaacttcgaagtccggtttgtgctgcgcggccacttagatgtgattcgatctgtcatcttcactggtggtggtagctcggacgagcccgaaatctgcacttgcagcgacgatggaacgatcaaacgatggatcatcccaggtacttctggtggctctggagccggttctagccatagctcggacattacgagtgactttactcaccgaggacatgaaggcgctgtgacttctcttgccgcctgctcaccgtcccagaacaccttcaatggtggctctgtgttgggtgatgggttggtgttttcaggtggccaagatgccagtgtgcgtttatgggagcgtgggcggattgatcccaaggccaccttccacgagcacaaagatgcagtctggggactctgtgtccttcccgggaccatgggctctgtttttggcgactcaagtagccaatatggtggatcggatcgcatccttctagcctccggcgcagcagatggttacgtcttgatttgggctatcggcgcctcaccctcggctgcaaaccgccgtcaaggcagaagggagcggtcgaactcaaattcaatgccctccggttccaacttcccaactttgcctcagcccagtgttgctgcacccccagctttccattacactattgttcatcgcatcacccgccctaattctccttcccccacatgcattagccccttgtctcttgcaggcgtcaattttgtcgtctcttactcgaatgcctctatcattgtctacgacacgcggaccggcgaagaaattgcgggtatggccagtctcgagacatacgatggcacgccagctactggggtgaactcagtcgtcgccacgactgtcggctttgatggaacagttaatctcgatcccaaccgcgcgatggccgaagaagaagaagttgtacacggagctactggatcaagcagcgtagagggtgtaatcatcagtggttacgaggaccgatacatccgcttctttgatgccaatagtggtaagtggcatccaaagtgccttgatatttcccgcaatacgctaatattcgatacaggtcaatgtacatacacaatgcttgctcaccctgctgcgatagcctcactgtcattatctccggatggacgtgagctcgtttcggctggtcacgatgcaagcttgcgattctggaacctcgagaagcgaagctgtactcaagagttgacaggctaccggctgatgcgtggcgaaggagtctgttctgtagtatggagccgtgatggccgctgggtcgttggcggtggtggagacggcttggtcaaggtctgctctcgatgattgaaacgacggaatgaaaacccgtgtatgattcttcttgcgttatacctgtgtgtgtatctcttcgcgtttgctcgtcgttttctgtatgatcccatgaactggatgagcgattggccggtccagttatttcgagcatttgcaacggtgtttactgacgttgtgtggcctcccatactctcctacttgattttgctttttttttctcctttcttttttcaacatgtgtactttttacttcgctgataacatgttcgacaaagattccctggcgtgcgtggatgttttcttcccttcaactgttttggtacatgctctattctctatgggagctagatcccatcttgttcggatactgttccatttgctcttgtgatagggtcttgattgggtttgaaggagtgcctgataggccttgaaattatcccaatacttgacgtgtcggttgtttggtgtggatggctttttttccccagttctgcttgaacgtgcctatgtagtttgtgcctcggaaaccgatagctcatgttgtgtgtataacatttgaatccataccattcatcgagcaaactcagccttgttactctgtagactatcattgacacaagacatgtgaaacgacgggaacaaatacaggtattatacgatattgacattatttcgctgcgctgccatgaagatataatctatttggatgagctccacgcctccttgaacaccaatctcaaccgttttgcttcttcctcgtccttcaatcgctgctcgagatagccttgcaggtcatcccagaaagcctctgtatgcaacacctcctcaccactcggacctatagcagccttgggcggtgattcatcccgcttctctgtaatctctggttgagccatagcagattcaaccacctgcgcgccaccgatgatcatcaccccgatctcaacctctttgcctcccgccataatcgcaggttcatctgccaatacctcggccaatgtcttcccggtaccggtcactggcttacgcttgtataagattttgatcttgtctagcggaacttggcctccctgagcatcggtgacgcgcacctgcacagcatcccggatatcctggaccgaggtggtcgagagaggggcgttggagatcaggaattccagagcagggttgcgggcagacttgacgcggacagtgattgatttggatgagcctggtgcctgtactgacctcacctttttgggcattggaggatgcgcggctgaaaggcgggggagagtgtactatcgttttcacagagcatattagaatgatcttcctcaatgagtaaagctagagaatgttcgcatcaagactcacgggcactcgtagtccaatttgctctggatcgaagacataatcagcgcgaagcctgataggtcgcgagtctagcgtggacagaaatgatttggtaaaggtcagctccgacatggtgagaaatttggtagaaattctcaaggcagaaaaagagagagagagaaagcaaatccgagctgatagctgttggagtacggagtagtggaggtctggacctgggggtttcacttgatgccggtgggacaatagacacctggattataaggcatagttgtaaataagcacaccgcctttcattgcttctgtactgctggcagtcaccgcccgaagaaaaaaaaaaaaagacggaaagaaattacaagctccccagaaagcaaacactattaacgtccccatacacacccctttttcacaatgggtgtcggtcgccgtatgaagaagcagggccctccgggcccgctcgacgagtcaaaagtcacaatgctcaaaaaacgcaaggctagttcggctgaagcgcctccgaagcctgtaccagcgaagcgtcgcagatctaatgccgatgagactgtctcgaagaaggaagcctcgaagaagaaaaaggtcaatggtgctgctcccaaggttgattcaaaggaacagaagaagcagccgtcggtcacgaagaaggctgtgccggtgcctatgtctgatgatgatgatgatgatgatgaggatatggatgatgatgagttcggtgatctcgatgagatcagtgacggctcaattgatagcgacgatcaggctgaaggactgtccgatctagaggatgataactcagttgtcgactctgacgaggaaggccacacccgtggtgccatgttctccgacgacgaggactccgatgctgaagagagattgaccgctgcaaacatcgagggtctgtcgcggaagttggatgctgaacaacaagaggaggaggaagctgctgagcaggaaatgcaggaagccgccctgcagactaacatcgctgcacccgatgtgttcgccgaccaaacccagcagggacttgcccccgacctgcagctgcttcgccagcgcatcacagacacgatccgaattctgggtgatctgaagaccctcggcttgcccggtaggtcgcgtaccgattatatagatctcctactcgacgatatctgcacatactacggctacactcgattcctggcagagaagctgttcaacctgttcactcccagggaggcctttgccttctttgaggctaacgagactcctcgccctgtggttatccgtaccaacactctgcgcaccaatcgccgatccctcgcccaggccctcatcaatcgtggtgttgtcctcgagcccgttggcaaatggtccaaggttggcttgcaggttttcgagtctccggtccccctgggtgctacccccgagtacctggccggtcactatattctccaggctgcctcttctttccttcccgtcatggctctcgccccccagcctaatgagcgtgtcctcgatatggcctctgcccccggtggtaagacaacctacatgtccgccctgatgcgcaacactggctgcattgtcgcaaatgatgccagcaagccccgtgctaagggtttgattggtaacattcaccgtcttggctgcaagaacaccattgtgacgaacatggatgcccgcactgctttccccaaggccatgggtggcttcgatcgtgttttgctcgatgctccctgcacaggtaccggcgttatctcaaaggatcctagtgtcaagacgtccaagaacgagcgtgatttcctcgccattccccacatgcagcgccagcttcttttggctgcaattgattccgtcgaccacgcttccaagaccggtggatacattgtctactctacttgcagtgtgacggtcgaagagaacgaggccgttgtgcagtacgttcttcgcaagcgtcctaatgtcaagatcgtggacaccggtctcggtggcttcggtagccctggattcctgagttacatgggcaagactttcgatcctaagatggcgctcacccgtcgttacttccctcaccgcgagaatgttgacggtttctatgtctgcaagctcaagaagactgccgtgactcccgtggccaagtcggacgacaccgaaccccgttctaagggccccaagaagacccgtagtacttcctcgaatgcctccacggacgacgagtccattgaccggaccccgatcgttgatgagaacggacacgccgctgatttcgagggtggtgccttcagctccttcgaggatcccgaggacgtcgagcgcattgctcgcgctgagcgcaaccgtctgcgtcgcaagggtctcaatcctaagggtgttctgaacaagcccaagaggagcaagccagaggtgtcggagaagacaaccgaaacggtggcacccatccaggaagaagagaccaaggccattgtctcgaagaagaccaccaatgagccgaagggtgagaagaagaccgtggttaaagaagataagaaacccgtcaccaaggctaaggaagagaagaagaccgcagccaagggcaaggtcgagaagaaggataagaagtcgggcaagaaggccagcaaatgatcaatgacttgatcattcgtctctttgtgtataatcttcgtttttcgttcttcaggcaagtcaaaagcatcatgtattaggtccgggatccggcgcattggatataccttttgttcaatcaagatcaaagtgtttcaaaaaaatcaaaaaaatcaggacaaagagtacaaagaaatttaatgtaagattgtgctaaatcaaagatattcaatttatcccaagtcctaggtttaataactgttcttgtctatataaccaaaatgagagtataaaatcaatcgcatcactccccggccaaattaccgttcgctaaaatcaatgaatcgaagtactcgacaatataaaaatagcccgtaccacttctatgcccgataaatcttgatcaccttcttgacctctttgcggcacatcggacataggctcacgaggttcgcacaagccacacatgaacaaaggtgtccacactcggcgaaaactgcatccatttcctcggtgtaacagatttggcacaaatccaactcttcgtcggccacttcccagtagctgatgcccttgccgtggcgtttgccatccttgaagccgccgacatacttgttgcctgtcgtcttctcaacgtaagtaccttgcccatggcatacatcttcgacccaatcaccatcgtacgaatcgccggtggggtaagttagcttgccttggccgtggcgtcggccgaaaacgaagtcgccttcatatatcatgcctgtgttggagatgtgcttgcctctaccgtggtgacaacctttgaggaaatgaccactatagtagtcatttgcgaaggtggcttcgatagtcttagtgccggtgaaaccttggattggatgaccgcgagaataggcccacaggtactgaacaagacggtcaggactggtgaacaatcccgatgaagccagttgagtacgcctttgtttgtgttaggaccaaaagctaatcagatatatgtgtacttacttctccttatttaatttatcccctacgatgaaacataccccgtgcggagctactacatcatcgaagctgtcggcaggtgacaccgtggtgacggcagcaccatcgaatcgtttccaaacgaggaagtcttggcggatagggcgttgtaagtggcgtcggatggatgctttgacgttggcatcaagcctggagaagaatgaccccacggtacgaagcacttgattgtcggcgtcgaatatttgaatgaagtagtatgtatggcccacgggtaacttgacctcagatcgggtctgcgttagacctgccacttctggtgcagaagactgaacttcgggaggtgaaatagtagcggggcttgtggcatctgttaacggagttactgtaacagcagccgtggcttgttgatcacgggcagcgacagtagctaggaccacttcttgatctgctctttcagtagtaaaagagtcgttctctagagacagtgtggctaatggaggcagtgatccatcatcgatgatggagttcacggcacctgacgcagcagaacccccatggggagtattcccagatgagctagccacggcatctccttcggccacaggcgacacattctcagaagcttcgtgtatccagttctcgatgactcggtcattcggcttatcccccgaagagataactgcaggggggtctgggatggcgaagaattgagcgtcctctgttggaaattagccgggtgatggttaggaataaaggtgcatgcaataacgtaccctccgagatgatttccatccaaaatcgtatggtgctcaatgaaggatctagaggagcattcaaatccgtagtgcgatcaaattctagcgagaatccagattgagcaaaggagttaccaatctgccagaaacgaacccgctcgggaccaatgggttcagagcctgaggacttccatatagcaattctttttcgtagttctaccaagcgtgatgagcgtggcaaagtcatgtacatgacactgtttgccgctttggcctgtgccatgagatcgtaggaatcaaacaagctggtcaactggtcatattgaggaagcgcataaacctcaacttgaacatcatccgcagacttgtcaccagtgtggtacactcccgtttcatagtattgtttcaaggtctcagaaacttcccaaggcccttggggaccaggcaaaagttccgataccatatcactgcgaacgtacattgcgatgacaggtacgtcagggcccttcttgtaaatcacagcctgggaaggatcaagaccaagatgtggacccatggctgttttctgagtcaggcactccacgcggttgtcactgccatcgtcaaaagccagccatgtggtacccggaccggctgggcgaaggatgctgaagaacttgcctgaggtccggcggccacgatgaacaacatagccataaatgacatacttgctacactggccatcaatcacccacggagccaggtccagctcctcgtctaactccactttgtcataccgcagctgccaacgtttggtcttgtctagactatggcggccaaactcaacatgaagaaatgatggaagcgaccaacgaccgggcttagcactcaagtatcccctaacggcttcggacgtagacttggcttgatcaattggcatgtaaagacgcgagttgaaaccagtcggcagcatgtttacggtgacttcgccatcagaagacggagcatgtacaaccggactgtcgaagatatgagcgaattgtttgctggcctccgttcccttcagctctagctccaagttgcgacgcaggcgctcccaaaattcggacacatcgctcgaaaattcgtgcagattgcgcaaagtgctagtcacgccgtccgtatcgacatagctccgagggtgtgtctggcggcgaagctgccacatcaacctttgaagggcctcacatagaggcttcggcctagcatcagcattggtaagatgttcaagtacgtcaatattttgaatgatcttgcaaaatggagcaatgtgcaaccacgaggcaagcccggctacctctgggctatgattgatgattgagtcacccagaggtcggtaaccggtcaaggccatgctgtcccaagttggctcggaatcacttggatgccaccagagggacttggtggggtcgtttattacacgaatatacgcgtcaaatgagagagtatcgtcattcagaagggcacgatgttgacctcgccggcgtgaatgaatttggtcccatgggccgtggaaatatgtccacccccaatccaggttatgagtgttgaattgatgacaagaagactgcatccacccggtccgtggctcttgtgggttgtatacaatgacaccgacctgtgcggggacacgccaagggtccgaggttccatgatcagatgggggagtgttcctggccgcaggatattgagacttgtagtcttccaaccacgctgccgcatcgtccgtggctgaagtctttaattgaatctcgggtgtactatcatccagtgaggaatcggctgctcctcgacggaccgtaaattccatcccaggaagcttgccctctggggcgggcatggtggtagagcattcgagatatacactcaatgcattgacattgttcccccgaggatagaacttgattcgccaccaataacccccaataaatgctggtggagagcgaattactttgtcacgattggggtcttccggggtgcctcgaacacccttgaaggtccacgtgagacgggccttttcggtgggaatgtattctggatctcccaaatcacgaaaaaagttggtttcccaatatttgtctgtcaaggggttagcaaatactggatgcttcgtgatcttgcttctaaggttgacacctacgatcactggcactgtaatccgaaccaccgccttcgatctctttcatctcgtcatcgtctgggaccgttgtgtcctcctcatactctgcccaatatgcatgctccagctcttgcgagggcaggattggcgcgggctgaggagctgaacgtgatgacccgggggatcggtttgagtctgtattcggtgttctcaccactctgggtaaggggtccatggccttcaatgagggaatacccaatagttccaatagcttccgacgtgtttcaatgaatatatgagcgcatgtatactcctgtataacgattgataagggcttatcggataagaagaaggttgcggagatgtccacgggtggatagaagggggtccggtagatagggagaggaacgagcgaaaacgaatgaacaagttctagaatagggggggaagaagaagagaaagaaaaaaaaaagtggaaggaagaaaaggaaaaagaaagaagataagaaaaagaaacgaaaaaaaaaaaaaaaagagtccgggggaagttgccgagtggagtctttttgtataagactggattgcctaggctcacggatgaagatttatatgtagatagggtgcatagatatacacctaccgagtagatatagtctaacttcaaccttagacaacttgtctattatacagcgtacctaagtctagcggtgtgccaatccgatccccactcaggggagaatatccttatatgccgagttttggaagattcggtggcgacttggcttatcaaatttccctttcgccactgggccttgcaatccctgggttatctgagccacgccacctcggaaaactattcacttttcaggcacatcaggcatatcagtcatgttgggccgatcaacgtacctgtacttgtacaatgagcgggggccaaccgtaccaattgaaacgatcgcgcgatcaaaagaccctcgattgacaccaaacggaccacttttcgacggtgagtgactattgattggctcttggaaaaagaaccatttctagaccgcgggttcccgcattgcttggcaataagtcttgtcgtactgagactcgacgaggggtaaaagtgaaatcaattttgtgtcgattcagcacgggcaaatgaagcagctacaatcatagggaatactgccgtggcctcagcatagacctacagatgatatggaagtcagcttggcaccaaaagagatagaacaaagagatcaacccaccttgacagacctagcatccgtcttgatcttgccccagctcaccgcttcatccggccgcgcacctgcatcgctgccatcgaactcctgcgcggtatttacatacactgcgtgctcggccccgttgcgcatcaggcatgcattggcgatgtggtgcttgaccaacccaccgcccaagatgatcatgccggcgcgtgtcgctcgaacagccatggtgttgatacggcgcacatcgtctacaatatccacccggagtcgttgtggggaagacttgaaggtgtgaaagtaaagcatatcacccagagatccatccgtcagggccggacagaacacgggaattccattccgggccgcccagtatagaaccgaatcctcgtggtcgatctcacgacccagtcgttcggtaatgcggcttggcgtccagtgaagctcgtcttcctcgtctccagtctcccgagccttgatctttgcagcctcctgttcctccaacatcttgtccaaaataggtaccacccagtcctcgaaagcacagtagttattgttgggtacgaggaggttgccaatgcggttgaggcccttggcacgaaggccagcaccgggagtcgagaacgatccaagatatgtgggggccaagcatttgatcaaatcctcctccacaccccccgcagtggtcacaatggcagagacatggttatgtttcactaaataacgtagggtgtctcgaagaccggaggaaatcaagttcgatgtatagccgaggaagatggtggttttatttcccgtttcgggatcacggaaggcgcgctgagaaacggactatcagactctaatgatttaaaagattcaaagattgcaattaagttcataccatttcattgatgatttgagccgcctcggccaccgcactgccctggaaaccggtatgggccaggctgtccaccatttctgcgacagtgatatcccttccttggaacttatcaaaatctaccccgctcactatgtgagatccctctgggaccggttgcgagctcttgaggacggagtcggtcaccgaagagggaactattgaaggctgctgggcgctcatatttgcgatcggattggaagggacgggaaagaaaataagagaggaattggcgtgaaaggcgttaaatccgcttaaatggggttatcaagatgaggagtcacaacaaaaaaggaagatcagttcggagtagaaggagaggggcaggtgatctttttttttcggcggggaacttgcatcagtctaggcctggatgcctggatgccttggggccttgatgcctcaggcatgtatccataattagtaccattctagaattggagacttcaaccctggagataggttagaatgaataaagaatctcctataatattggcttcatactcttccaagtgtctcatgtctacaaatcttatctctttcgacactatactgctacattcatacatgtatgttgtgctcttagacgcaacattcaatgcaaatagagtttaggaggcacatccccaccacactagcatctaaccgggttagtgccgagccccttgaagtctcacgaactcatattctaaacatattccaaacatattcttcctcgacctgccttcctttaatcctcccacatactccacagagtatacattactctttgattgcataacatccggcgcaaggagctcgcatgatttcgccgatcttgtaacgtgctagtgtttcctgtttcaacgttaaattccttcgctcgacgaatctgtcaatctgtcaagttggacgcttcatttgctcaattctcaagactccaatctagcaatcgtgaaaggaaaaggaacagtacgtgacattggatctttccctcccaacttgaaaaaagacaacgccttacccgatcgggtatccgtgcgcttcaattcttcatatggtccgtgcattcatcgtcacgtgcagaccctcccgagtgtccgttctccatctttgggtatgtgatgcattctgcattcctaccgccttgggctgatttgcactgtacattgaacgcgctggagcgctaaccagtctatagcttcatgatagcatgacgcgataatgtcctcccgatttcccccatcgtccgggttcaatccccgtgaccgttctccgcagcgatttggagaccgtcgcccgccggctggtcctcgtggtcctgacgacgggcctgcaccatttggtagagatccaccccgtggtcctcgggctcttgttgattcccctcgtggtggccattttggtggtcgtggtaggggttatggccgtggtgactttcgtgaccgtgaccgtgacccacgagaccgcgaccgagatcgcgattttcgagataaccgcgatggcccgccgtttcgccgagacatggaccgggactgggttcgccgtgaccgcgatttcgatccccgggacaatcggattggctttggccgaggccgctcaagatcaccgacgcgcgactttcgagacataagggaacccccgggccgcgattttgatctggttcggatacgacgcaactccagggacagcatcatatctgcatcttcgggaggcccagaaggtccccctcctaatattggccatatgcaccggggaggcatgcgagggcgtggtcgcggcgattgggaaggaggccgaggtcgtggtcgtccacccttccttgatgatcgtgatcttttccgtcgccgtagtcgatcccgtgaaccatggcgtggacgtgatcggatggtggatcgcgatagagatcgagatatggaccgggatcgtgcattagaccgtgatcgggtaatggaccgagatcgggaccgagaccttccacgcccgagagagcgagatcgagaattagatcgcgatttggaccgtcgagatcgctttgaccgtcgcgaagattgggacaaccgacgacctgatcgcgaggaccgtgatcgcccagtggacttttggaaacgggaccgtcccccaagccgtgcagatagtcgcgcagccagcggctcaactacatcctcacatgctcctacagcacccggccctggacctggaccaaccctagcagatcgtctgcccgagcatccacaagtggatcatagccggaaatcttcgaccattctcagcactacggctctggaaactacgcgagattctgagggaaatgaccctatcgctgttcgcactagtggtactcgactagatgctgttcgccctgaggctgttcgccctgaggctgttcgccctgaggctgttcgccctgatgttgttcgctctgatgttgttcgccctcacgcttctcggctggatgctgttcgacctgatgctgttcgccctcatcctcggccggctgctcctcgatcggatgctgttcgctctgacggtatgaaaaaccctggaccaatcattcggaattcaccacccccagccgccccccaggtgccggcctttggctcagtgacttccccaatcacgaatgcttcctcaaataaagttttttcagaccaacgcacggcacccaattctactttgcccacagagagagaccgctatgaagtaccgcaaagacaaccggcccaaccccctacagggcccaaggcagaaaggatcgagagcatacagcctcttgaacctcgcagccgccctgaaagaccccgtgagactggcaagcaccaagttgtgccccctcgcctctctaaaccgtctatcaatttccctgatgtatcaccacccaccgctccagctgccatgactcggccagatccgggggcagggcctaacgaaggatttggggccggaaggtcgaactcacttacctcttcccccactttttcacgaattccaccgcctgccccacgcgcattatcccgtgaaccctctatgtcccctcaaatgcaatcgtctggcattccaaccggccctcgagcattgcaatggaaggctccctccccgcgtggccgtaaaggcagcaaacagtgggtgcgaccgggctacggccgaataccctctatttctaatgcactgccgaagcaagagcctgttgaagagagcgaaggtgtttcccctgccaatgaagccacacggcctctattagcacctgagatagacgaccccgagagtggcgagattcttccccatgaacctgcgagagaaccctcgcctgtttccccgccattgaacctcccaccccggcgtagtttatcggctgttgacattcaaacaagtgatgcaaatgaaccttctgagatgagcggcactgataaacccgccttgatcccagactttgaaggttcaagtgatgaggaagatggggagaacattgttttcacccaagaatatcttgatgacaggaagcggatatttgaaaaagatatggagtcactgcgagcagaattgcctccatcacctttggaagattcggccattgtggctcttttgctaaaaatccagctacttggcatggtagccaacgaaaagacagttgaaaacccccccgaaccactcgccgaaccacccaccgaacgagtattagaacaaccagtggatcctgtgccttcagtagaggatgaagagccagtcgaccattcaaccactgagcgagtggtctcttttccctccacactacccgagcgcgaaccagagccaattactgaaactatcatcccccccatggtgccacctgatgaggttactatcgagagtctcccattcttgcactcaggccctccaatacctatttcagatatggatgtataccatgagaacattacgatccaaaatcgtctcagagacacgttcagcacagaactttcgaaggtgcaagcgagaactttcagaaaaaatgcactcctcagggacgagtatgtgtctcactacaagctctggcgaatggctatttgggagctcgatcgtatgaaggagaagaagtccgtgactcctggtccagccttctcaccaatatccacggttccaactaccccggcgcccatgccggaaggccgtgaaggccgtcgttacaaaggaaatagcgagcttgatttcctcaatgctttgaaggcctccgaaatctccgcccaagaagagcttgaacgtcgacgaatcaagatggccactgctcggcccgatctgggccgtgaagcgatcattccgaatatgctcgaaccgcgggaggtaaaggcccgtatctacaaagatgtgaacaacaacattgagtgtaatatggctctggatgttttcggtttcgtgccgcctcctaatgatttcaccccggaggagcatataatctttacggacgccttcatggctcatccaaaacagtggggcaagattgccgaatctttgcccggtcgaaatttccagcagtgtattgtacactattatctcaccaaggaagagattaagtacaaggccaagctcagcaaacgctggaataagcggagcaaggggactcgaaagggtccacgaccgaagtcaaatgccctcaccgcagacatgggtgtggtgaaacctgaccatgtgggtgaggaggagccgcccgctgtcacagacaccggtcgtccacgacgtgcggccgcgcccacctttggcgattccaccgaggtagagagcacgccgattggccgtcggggccagcttggcaaggacggcgaaccagtggatagaccttcgactcggcgtggcggacggggcggaggtactcgcggtgcacggcgcgtgaagagcactactcaaccagatccgaagacccatgtggtaatgccacagggcaatctgcccccgattgtaccgccaacaccacttcatcctggaagcgaaatggatttggcctcggatcacatattggaaggatatgaggcccgcgaacaagagcgttccgaaaaagaatccataccgccaatttctcgaggcagggtgggacgtgggcgagcgaaggaaggagtttatgtcttcgagtctactgaggttgaaccttttctgggaactaaacagcttgagacgggatatggatccttgcaaccaacgagttactggtctgtaccggagcagcgcgatttcccagcgttgctgggacattttggtcgtgatttcgagggtatctcgggttggatgaagaccaagacaacggtgatggtatgtattgggtactgagtcccaatttttgtttttcttctttcccctaatgtcttatgtttgtggctaatgtgcaggacgcaggtgaaaaatttttatcaacgccgcctggactcgggccagaaagactttgagttgattctaacggacgccgaggagaagaaggctcgcggtgaggccacagggccgcttcctgtcccaagtgttgcgccaaagcgacgatacgaggcaactccgtcttctattatccctcgtccacttgcccctcatggggaccctatggccgaggtcgatgaaatacgattccctaaaggcaagcctgttggtctctcaccgcaacccatgtcgctgcatggacgacctctgtccgacaaggaccggaatgtcggtcgctaccagccactggcacaagcttccgctgcttcacctgtgccgtctaccgcaactctaatcgaagagtcgactcgggcaattcgcgcgcaaggaggtccatctcaccgcgttcagggcccacgccttggatatttcacagaggatagacgagactcttcgggattgccccatggcgcgtctcgtgcgcaagaactagcgatttcctcgcgccatcctgactccatgccgacggatatggcaagaatggaacccttgtccacacagggctatattcccgcgcagcagccaacttctcacctttcatcaacccactcacgtcacgccagcttaacacaaacccccggctcgccatccctgcaacttagacccgaactcgacatctcgtctgttcaccgcgatccttttgcccaaagaccttactactcgcttgcaggtcagcccatgggtctaccacagtcgcctcgtcctgggttgtcgccagtgaaggacgtccctcgcccgagtgcgactcccgctcccgacgcaactcgtcaggtgcctgcaaagcggtctaacatcatgagcattctcaacgatgagcccgaagagccccaaccgcgcaaacgatttgccagtgagcaggctccatctgtccctggcgcaacctcaggcataaacccaaggcccatataccaggctagcggaccccctcgccatgaagacaatattatgtcaggcatgtcgcaaaagccttctgtttacgcccagcaaagccaatatcagccgtcatctcgcggctactcagagtactctggctatggtccccctcatggtggctcgggcacatcaaataatgactggatggcacggtttgatccacgggcgcaacagactccgccacagcctcaagctccatcactgccaccacaacagcagcaaagcggccgtcagggttcgtattcatcttacgcggcaaatccaggccaatcctccttgacgaatctttccgcgccatccccagcgccgactccgccgccaataaatgcctctcaacgatcggcttatcccaacgttttctcccaaggctcctctgctcaaccacccatggcctctggctcccgagatatggcctcgcaaccgggttcctatcgacaagggtcacctggcccgcgtcccggtatggtgtatggctcccgacaagatccaccaacgccagcgcagtcttcggctagcctgtatggtatgcatccgcggcagtcagcaacgccaaatccagtacagccacacagttatcaacaacatgtgcaaacaatggtcagtggatcgcatcagccgcaatcccaccgctcaacacctgtcaacttaccaggtgcttcttcgcagtacgggcacaacacccctcctcctcagtcccaggctggccggtcaatggcatcgctggcgagcctcggtcgctcatacacccctccatcggctctacattcctcgatgagcgggggcactatgggcggctatgccccccctcagtcatctgcgcctggatcgataccgccactccaccaacgacctccgggatcgcttggtgaccctgtatccacccaaacacatcaccgtgtctacagccatgggtcggctcaaggcgtactaccgccgccttctcaacctcctcgctagggtcctttgttcgattgatttgaatgaacttcatgtggaaggcaagaccgtgacgggttcggttgtaaattaatttgttgtgtttgtgtttctttctcttgtttagcgtcctggcatctttgccagcgaggatattcatttgattatggtttatatgtataactagatgaatgattttatgtgtcaaaccttgatgtaatgaatttttacaaccttgtaggactaactcaatatctacattagagtgaaaagtatgccctcatcaagacatgttaccggtccatctggttcatatggctgggcaggttccattcatcatagtccaaatgcacaaaggcacggtcgacagtaggcacactctcgatgatatactgcaaactctcaccaacgtcatgactatcccgcaagctgatcttttcatccacaacaaggtcaacttcaacgttcagcttatcactcgcgtagtaggctttcaagtcctgaattttatgaatcacccgggagaaccgcatggtcatatacagcaaaacactatgatcgtcgggagaggcagccgcacccgtcaggcgctggatgtattccgcagcggtctgaccccagttccacatgatgtagaaggagaggaatagaccacccaagggatctaagtaccagagatttgcagcagtaccaactacgatcggtggctgttagttggtactctatgtagggaacaggaataagactgacccagtgggaagatgatgctgaacgtgttaaagacaacgtcagtcatggcatcctgggccaggacctggacgcttgggctaggaatcaatcggcaccagatccagcagaggagcttaaccaaaactgtaccgcccatcagcgagattgatgggatggatagcttaacaaccgtgcggtcgtccccaatcaattgtttgatagaagacagcgctacttgaaaaaaggaagtcaccatgatcaccgagaagatcaacacactgacaggctctaaccggcgtcggctgatgggataccggttgcgatcctgtcggcggatcataatggtggtcacccagacaatcactgtgctaagaaagtccaaaaccccatcaactagacctgcgagcatagacatggagttagtcattgccatgatagcgatctttgaagctaggagagcaacgttggcgacaaaattgaggcgaatggccaggttgatgacgcgctcctcgtcatctagggacattccaccatgcgattcgaggtcagggaatggctccaatgggctgtcttctgcgtcggaagaatgaaccaagggtgtcgtctcatcggggatccgataaagattatgcggggtgcgtttgacccttccgatcttgggattgggttctggtgcctcggtctggttatcctctaacgcagacggctgaagaattctgtttcccgaagaatggtgattgcatccattgtagtcttcgatcaggttatggggtagcgaagaatccagtagtcggtcaatatagagatattgggagatcagtccattgtttcgttcatggtatttccgactattccgggagtcagtgcctagtttactgatgtgaggggcaagccgacatttcctttggaagattctttaatgactcgggtgatttgtagtagcgtttcctgcggcgccggttaggaccgtaattgcatcaagaaggagagagatagtaccactcatatcgaggattactgtgtccaatcaacaacgatccgcgtctgagaataagtcgcctttcaggtgtatcgtcatcgagatcgttcaaggcaaggctcgatgtacgagaagggaaaaggttcaatatgtgttggcctctggtggaaagaatttcacgctccggttctaggcttggacgtcggggacgtagaacgggcgaaggcgatgatggaggggagaaaatcggaagaaatgtttgggaagacatcaattggtccaccacggtgaagaagtgaagctagtaggagctcttttttttgtgcaaggtaggacgcgtaactagttggttagttatggtcacatgacttctgccttggtgattaggtgtcgaggtcaaatataaacatcagcatagtataattgcatcggttgtattcaatggtagaaaatatgacacgatgcacgatgtatatctgtatacaatgtatgttggtcgcatatactccgtactaaggctcaagttggacttgcctaaagtggaatagtggctgaatgcttcggtacgtcgaggccgtacgttcttcttctcttctcctcatcttctcatcttctcatcttctcatcctctttgttctataaggctcggaataggttcagtattccatgaatatttcatggaacctaacagtatcaaccatattgccttcatctcaggtccgatcgacactggacctgacaaatcctactttcacactcactacttaacccaaatcaaccacgcggtcaactgcaatcacctctttgttattggtcccatcccaagtggtgtggatgcagatgcactcgcatacctcttggcataccctatctcacctagccgagtgaccatctttgtgactcaagccgagaatgggatgtggggggcgcatttccgctctttcggagtcaatgtgcgggtagtggaaggccacacgagtcatgatcgagatgcggctttaacaagtgccagcacgtacgatattctacgggtgcgcacaaagaaggaggcgaaggccttttatggccacatgtggcgtgacgggcatgtcacgaatacagagcgcaattggaagcgacgtcgaggaattgcggagtatgagattgtaggagaggagacgatcaatcgttcaatggggtatgacatgggaccagccctaagcaccggcaggcgtctattagcacgagtcagcaaatcttgcaaaaagccgaacagttgagccacaaaatagccacagagaagagagagcacaagagaatatataaagatcaatacaaagaatggggttcccatcattagcggaaattggaagtctcgttgttccgcggggaaatcattgaggcgagtgcggaatgagtattccgtctatgccgcgcagtggagacatcctcccccggactgatgcgttgttcgttgacctataagaaacggcttttactgatccggtggcttatgactggctaatgaacggccatgttaccccagctcttgtttccccgagttctcgaaactcggaaatatgccgtagccgagccaaagaagaaccctgagatggagggggcctataagagatgcatgcgtctcccactggtcatgaaaatctgcaatttcttgtcaaacttcctctatcatggcgatccaaacacttgcagtcgccgttatcacggtggtgtatttcatcattcgctattttaaccgcaccgatatccctaagatcaaaggcctcccggagatccctggagtacccatcttcggaaacctcctgcaactaggagatcagcatgcaacagtcacggggaaatgggcaaagaagtttggaccggttttccaagtgcgcatgggaaacaaggtaagtgcttcgctttcacatgggaggtgacgagggagtttgtaatctaatgtccaattagcgcatcgtgttcgccaacagctttgaatccgtccgtcaattgtggattaaggattcatccgctctgatctcccgcccgactttccacactttccacagcgttgtctccagctcacaggggttcaccatcggaacatcgccgtgggatgattcctgcaagaaacgccgtaaggcagccgccacagcgctgaaccgaccggccgtgcaatcctacatgcctatcatcgatctcgaatccaattccagcatcaaagaactttaccgggacagccagaatggcaaacgtgatgtgaatcccactgcatacttccagcgatttgccctcaacaccagtttgactttgaactatggcttccgcattgaggggaatgtggatgatacgctgctgcacgaaattgtgaacgtggagcgtggcgtgtctaacttccgcagcacttcaaataactggcaggattacattcccctgttgcgaatcttccccaagatgaacaaagaggccgcagacttccggggtcgccgcgataaatatctgacctacttactcgatatcctcaaggatcggatcgccaagggtaccgacaagccttgcatcactggtaatatcttgaaggaccccgaagctaagctgaatgatggtaagttataaaaaattcccgtgtttgttgaactgagtactcatattttgtctagccgaggtgaaatcgatctgcctgactatggtgtcggctggtcttgacactgttccgggtaatttgattatgggaattgcctacctggcatctgaagacggtcaaagaattcagaagaaggcctatgatgcgatcatggaggtctacccaaatggggatgcttgggagaaatgcttggtagaggagaaggtcccctatgtaactgcactggtcaaggagatattgcgattctggacagtcattcctatttgtctgccacgcgagagcaccaaggatatccaatggaatggagccacaattcctgctggcacgactttcttcatggtaagccgctccttgtttctgtcctattcgtaaattactaacagagcctttagaatgcttgggctgccgattacgacgaagatcacttcaaagatgccgataaattcatcccggagcgttatttggaggtcaacgagggcgcaggtactccacactacgcatatggagctggttcacggatgtgtgcaggctcacatctcgctaatcgcgaactgtttactgcttttatccgcctcatcactgctttccacatgcacacggcgaaagatgcagccgaccgaccaatccttaatgcaattgagtgtaattcgattgcgacagccttgacaaccgagccaaagccattcaaggtcggatttagtgcacgcgaccctaagaagcttgagcagtggatcgccgagagcgatgaacgcaccaaggatctgtaagaggaccatattttggtttcctttttgaaaagaattctgttcaatgtggtttcctctatttttcggaggccatttatgtatctacaatatgtgaaatgaaagacaagggagtatagatatagacccgtgttggacctatataatcgactttggcctctctgcaggcctttaagaacctgaatgtagattagttatctgctagttctgagattcaattcctaaatggcacattttcccagtctataccagtctgtctcatttgataattcccccggggttccaaggtttgtggcggtttccccggcagaatctccccgcattttctctccgcacttttcttcctcttcaccctattccgttcagttgacatctgatcgctttaaattgtcttcaattgcatcgccttggatgatgaataccccgcatgtttaccctgcccccgagagctgggataacccacattcggtcgatgatacgaacgatgatcgcccgcggaaacgccgcaaatacatcgccaaagcctggtcagtttggaaaggttctcattcgagatggagtcctaacgagatagtgaagtaatggatgtaaacgtcgcaaaatcaagtgcaatggccagtcaccctgccagcgttgcggacgccagcatattgagtgtatatacgttgagaaccctcgagacagtcccgccgaacaagagtaatgcccaccccagctcggggcgtttaaaacaccactaattatgctttcaaagcaacttcaagctacttttcgatcaaatgagggccacgcaggaccagatttcccagttgtctgccagtattcggtcaatagccggcagcgaacattctcctgggggtatttccgctaccggcacctatgggcagctccatactcagcgtccacttagacgcctgtcaacagctagagagacatcatttcaaggcccgacgacatcggcctttagttttgaccttgcgaaatctagcctgcagcagcgcgggattgtggaacgtgctgaggctggcgacgagggcgatatgactcaagaaccttcaccgctggcgtcgccatcggcaccaaataaggaacttgaaacacaccaggctcttgatccactttgtgttcttcccaaagccgaggcacttcgcctttgccaagtctatgaggaggaaatgggcatcatgtacccggtcctggagctttcggagattttggaccaggttaatcttctctacgggccgagggaccgcgcacttggaccgaccgcccagcccgagggacggaatggactgtttcgcgaagacgtccatatcctacgtgtagtttttgcgtgtgcgttgaccgctgaagccagtggtcggagtgaacaggctattgctctttttgacagtgtacgagaagttcaggacaattgtgtctggggtccgcccgaaatcaagagcatcatatttctgactctcgtggttcgtcatacccaatcaaatatgaatgcgacatgctaattacaacgatagtcaatgttctattttcaaatagatgaggaaattttagcgtggcgcactgttggtattgttgagcgcatgtgtctcgaaaaaggtcttcatcggcgggaaactctaaatcaaccggcaatcatggctgttgggaaagatcgcgttttgcgactcttctggtctgtatatattttggatatgcgttggagcttcgggactggaatgccgtttgctctggaagatacagatattgacccttggctaccagagccggccgagaaaacgccctatctgcgcgtgatgatccggtacagccggatcgcagcgaaggtatggaagtttatatcagcattcaacaacacaaacgaaatcaaaaaggaagagatgaactatttggattggcaggtgttgcgttgggtgcatgccattccagactcgttgcggctcgaacatccgagttctgcggagtctgagactgctaccgaaggctcacggagcctgcgcagactgcgtgctctcctttatcttcgtgctaatcagctacgcatgctcattcaccgtcccgtccttcatacttcagcgcatgttatgcggtatccaggcgaatcagaaaccgtggtgaaaatcgccaaagatacaattcgcttcattacccgcttgaacgatacatcggacatctatcatttacagcaggtggcttttaattggtttctcgtctcagcacttgcagcgttattcctggcagtagcccaggctccaacacaattcagtggatcatgtaaggaggagttttactgggcattggagctggtcaaaggagtctcagcccagtcttatatctctcgccgactatggaggtctattcgaagcctccgtaagcttggtcctcaactgggtctggggcttcagaaaaagtgcctggatatcgaagcgggagtcgaaagtgaccattcaaatgtccacggttcccccgcattacccctttctgccagtagccagagtcagacaccacaagacggggaacagatgacacaggagttgatggagtggtttgaagccgtggggaatctggaggaccaaataatgggcatggggacgggccctatgccaaatggaggaccttaccagcaaatgcccgacggggggtttgtgtttgattacggcgaagaattgtcaagtgtgatgagagatttcttctgattatgtacaacatgtgtcgatgtgaagtcttagacatgcgaatttgaaaaaaaaagaaaagggtgggggaggttaagactgacaatatccaacattgtctccggatttgtggttacattaagaactctgttctgtttctgatttcatgataatatgtgtagtaccccagaaagaatatcccaatattggagaggagaaaaaaagacagacgtgaagcaatatatgaatgtgaattccccggggtattcgatttcttcccgtgtgttgtaccgtgccaacatcgaggttgaactagtagatatatttaaagtccagttccccatcgcccgtttggactcgccgagtctcttctctttcaccactgataatttgctccttcaccttgttctcttgccgcaagtagagaccatatacagttactgtgacctgcgccaccgcaagggaccctaaggagaaggagttacccagcacataaggtgatgtgcgatatacctgaccggcaacaataccagaacagttggcgactgtctgctggagaccaattgcgagagcacgacggtattgtggggcgacattcacgttcagccaggcgatattgagaccaacggacgtgtaggtggtgataccgatgagaaaagtggcaaagtataggacggctgtattctctaccgtgagaagtatgatgtaaccgacgatgccgaagatattagctgcgaagatgtactgtgaaagagttagtgagaaacggtgcactagagattgcaaggggctaaacgcaccgatgcaaattgggaatatcggtctgagcaccaagcaattgcgataaagatcatggcagcccagacatagactggaaccgtcaagacgttgctcatcagggagtcatagcccatgccacgcaagatagttggcaggaaagtgctgaacccatacaagagaatatcctgacagaactggatgagagcgctgaacatcaacttggggtctctgattgcgatgcgcatttcttcccagctaaactcttcacttcccatatacctgcgacgctgctcgttgcgtacccgcatcatccatttctcctcttcggtgaggaagtaggcctcagccgggttatttggcaaaccgaaccagatgaggatggcacagatgaagctaaacagcccttcgatgatataaacccatctgaaacattgtaagccacaatatccttttgagtgggataacgagaagcatacctccatcctgctttgccaccaatcccgtccatctgcaagagcccgtaggccaagagaccacctacagcccccgagatggcagcgcaactcatcaaataggaaacgcgctttgcttgctcctctcgacgatagaccatggttaggtagagattgagacaagggaacagcccggcttcgcaagcgcccaagataagacgagtcgcgtagagagagcctaccgactggataaatccggtgaagatggtggtcagggaccaaacgatgcatagccccgtcaggatgttgcgaggtgtcaatttcttcatcatgaccgcccatggtgcttcgaaaagaacatatgtcacatagaagatggagacagcggtcgaaaactgctctgttgaagcgttgatatcctcaggcatattggcaaccttaacatttcctaagctttgtgagctttatgctctttcttggagatttaatcaaactcaccgatactcgatctgtccaggaaacaagtgagataggtcaacataatgatgggtacaaaggcagtatccaacttggcgaggagttttgcctctttctttggatctaacaccacatccaaaaattcggcgacggcataattggcttcttcggcatcctctttttgtaaggaatctttcagctccaagggtatattgtgaacggtattgtgggacatggctgcaatgggggttgcagcaaaatcgagggtttattgaaacaagtcagaactaatgaccattttaagaatgtttcgatcgtgacatagtggatcatagtgaaacggactcttatcttgggccacgcgatactggaagccgagtccactgtgagtgggtctatcgggccgatggtgataagagatggcagcaggtgagaggttgaagaggtgaagaagggccaatagagggccaatgagaagggtattgaggggatatcaattaatgcaagccaatccgatgatgcgaacagatcctcaccagaagaggcaagtcgatacggaggtgcgcgtatgtagtgggatgttcaggtgtaagagacctaactagggttaccatccccgattaataatctgccggcaatttgattctccaccagttgaaacttgacgacagcgggcggtatatccctcttggaaggcggtgtactatctgtggggtcttccccaaccttttccccagacctatcggtatgtggattccgaaaatgataaccgagggtatctgattgtcaagaggtagatattaatatgattgatatgtaaattgttaccttctacttttccgagaggaagctcaatatggacagtctcgcccagcaggcacgactgcgctgtcgctacaatcaactgaccaataccgcgggtgttgcaccgggatatttacaagcaaatcttctggtacttccttcgaaatatgctgcggatttccatgatttgtgtttgcgcaacccagttccttgtcccttactgggaataaccactgttcctggtgacccaaacgccgttagaccggcagaatgtattcggtccggagattttgatattcggacagattttcccaaataccgagtatattcgggcgggaagtgcattgagagtcggcatgacttgtccgatttatggactaaggaacatgtgggctttttaatcgggtgttcgttctcctttgaggatgccctgacggcggctgggttgccaccgcgtcaccaaaagactggcaccatagttgcaatgtaccgatcaaacattccattgttacccgctggaatattcacaggcggccactgtattgtatccatgcgaccgtatcgtccggagcaaatcgagagagtgagggacgttactcgggcctatctgtcgacgcatggagagcctgtcgcctggggatgggatggtgcgcagcaactaggaattcttgatgtggcaaagccagactttggagaacagcaaatgttcgaggagggcgaagttcccgtgttttgggtaagttaggtagtcacatatccaccttcgacggtttgatctgacttcatcccaggcctgtggagttacacctcaaattgccgtcgaagcagcaggtgataaaatcaaaggtctggtctttgcccacgagcccggacacatgctagtcacggattggacagcagaagacctgcagaaactcaaacccggaagcatctagaacaaaaaaaaagaaatcaacatgaatccatacaatcatcaacgtgatgatacttctcggctctattctcttgtgacccaacacagtatcaacttgaaagtcttcaaacaccatcgcgatatcatccccaatggcaacaatgccaacgaccgaaccagtcaggttgtaattggttagggggtttgggccagatggaagttgtttcatattctttgtggttattctaatgtgattcctcggaaggagatctcgtctcttcatcgaataccttctttcccctataccacgtttggcacactcgagcttcttaaagggactccggtgcccagatcatatcaaccacaacgaaattggctttgaatcccgcacgcagactccctgtccatgattcagaaaaagacgcatatgcagtccccgcagtagctgccgacacagcggccgcgagggaaacagcgcattcaggattgatggtatcttgcagggagggctggatagaggaccgccgggtggtagcaacgtagagattgggcagtgcctgatggttcgcagtgggggcatcggtgccaaaggccaaatgagcaccgccttcgacaaactcttggtaagcgaaagctcgcttgcaacgctgaatctcaagcatctctggccacccaccaaaggtcgctgggtcaaggtggacaggctggactgaggccactatcccgagttgaccaagtcttttagcgtcttcgggggttgttatctccaaatgttcaatgggatgacgacaggctggcaagtcctgaatttggcataaacagtcaatagcctgctgcactgttcgatcccaaactgcgtagatgacgcactgcaggccagcattagtagcacggcaaatagctaatgaaagggcatcggctggccagataggatcgacgatattggacaatccaccatatgcttggtgtaatcccgctgtacatccatccactgtgccgtcacagagtagtttgattccattgatacaaaattccgaggatatttttctgttgaaggtttgttgaatctcaatggcgcgatcaatgtgactgcagatatcggcatcgcattttgagtaaggtaccaaccagtgtaccgcaacatgcatcgggagctcaccacgctgatttctgtacatattcaacgccacccatccactctcccccatagccatatcgacgagtccagtatacccagcgcgttgatgcgcacggattgcagcatcaatcgcagccaccttcttcttcatagacatgacccggtccaaaaatggccaaacaacgtcgaattgcgccgcctcttcgagtaggccggacggggtcccattatgatagcgatgaatttttccgcctggaggatcgggtttcgactcagcctctagctctttgagagctgcattattgcaccacgttgagtgaaggtctaatgcctcaatgtagataggtcgcggatctaggtcgtccagtacagttgcggaagcgttaccatccgtaactgactggacccaacctcggcacaaaatgcgtggatctgatgggtgagttgctgcgtaggtggtgatggaactttggatatctgcgacgttcttgcaaggcaaaagatcgagtttctgcagcgatataccggagttgagaatatgtacatggccatcaataaaccctgggaggactattcgatttctcaagtccaccgttgatgctgtggcttgaacccgaacaatcgcttcgtcactgtcccaaccgacgtgcgcgagatggtcatcctcaactaccagtgtggagacaaagcgaccccatgaaccgggacatagaatacgcccattattaaaaatcgttgtaacgataatgatacggtcaagggaagagggatggtgcagcaaaggtagcaagggtagttgactccttgagttgtcaaagttgaagttgagattgggttggtgtagctgacgtggacaaataagacacagacatgggatgccattggctgtatgagattgggcaacatttaaatggtgtaacattaagaggacatggaaagaaaaagcaatgaaatctttatttcagattgtcttattctatagacctctccttctctcggtgcgtattttctgtttcggatagctttgttgatcatatatagaaacccacacatctataactccatgtctttgaagataataacttatgttttgatgaatggaaattatactcggggtttcagtgtggattctcatttctgacaatagcgtggacgttttagatcaagatcgtaaaatcaactttctttgtgctagcaggaattcctaatagatatagttcataattaattatctacacaaggcataattcccgcgagaccactcttatatcagctagcttctggaattgtagtatccccgttcaaagtcgttgacccgatcgaggacaaatacaggtccctatggctgtggccatttttggattcttgacctcgacagatgtttaacggctcagtgtttaggagaattttctggttgtgttcatccactgaagaaaaatgttgctcctcattccaaagaatggcggaaatatgtcaattatttccgaccagggtatgctaaggttcaaagtctttgcaaaggatgtcaagatggaaacggtagttgggaaggtccatattgaagttcctatatatgctcatctctcgcgtagggagcatctactactgggctaggagtcttgcggcagctacagccggaattaaacttcttctattgattattttataccccaggatctcaacttggtgtatttgtcagtttatgcttcgaatcgtggcgccatccaccaccaatgacagcatgactcggttatctgagatatatggctgatgccggaggttatcttaagcctctcaacaattgctgagggaatccgatccaactacatccatagctttatatgtggtatttgttaagccgagacttcccggtcccgaaatctgcggtacataagaaatatcccacgcagttgagattctacgtgtgtaaggagtccggagtaatatgtatcatacgattcatacctatcaactatcatcaattgatcccttgcgaagggtggattcccgagatcggcgttcggcattgtctccgacaagtggcggggacattcagcactcgaaatacgtcaatttgtcagccgatggattattcccagtgaatacataaggggggaatctccacgtctctgaatctccgaatctccgaatagatcaattgttaatttctagagaataaataatgggatctcctttgtttcgttccccgccaatccaccgggccgagggtctgccctattttacccccgccaacgatgccggagcagctataaacgcacaggaccccagcatcccgacactgttccgccctttacgaattcgagatgtcatactcaagaaccgcgtgatcgtggcgcctatgtgcacgtactctgccgaatcggacccaacttctccggctgtaggcgcgctcacagattttcacatcgcgcaccttggtcatttggcgacaaagggggtcggtctgattataatcgaagcaacatcagttcagcccaatggtcgtatatcgcccaatgattccggcctttggcaggacgggacagactcagaacagttcaaaggactccagcgcgtggtgaagttcgctcatagccaaggcgcgaagatcggcgttcagcttgctcatgccggccggaaggctagcacggtggcgccctggctcgcatcccaagcaaagcaacgcggcatcaaagccgatgaaagtgtcggcggctggccctcaaatgtggttggcccctctggtggggaagagcagatttgggcacctggcgatcaattctggccccctcgcgagcttgaaacggccgaggttgaagaaattgtccgggcgtttgcacgaagtgcagggctcgctgtgcaggcaggagtggatgtaattgagatccacggtgcacacggatacttgctccatcaattcctcagccccgttaccaatcgacgaaccgacaaatatggtggtagctttcagaaccgaactcggttcttatgcgaggtggctgcagcaatccgtgccgttgtgcccagtggaatgcccttgtttcttcgtatcagtgcgacagattggctcgagaatcaaactgtcgcagaaggaaccggaagctgggacatgccatcctcaattcaactcgccaagatgttaccagacctagggattgactttctggatgttagctcaggcggtaatcacagaagccaacggattgagcctcatacgaactatcagattgacctcgctggccaaattcgccaagaaattcacgccgccaaacataagacactggttggagctgttggctttattaccgagcccgagtccgctcgcgatattgttcagggtgcagaagaagagaggcaggcgaacgaggcaatgctgtctggcctaaagccccaggctgatgccgtgttaatggcccgtcaatttctgcgcgagcccgaatgggtgctggcggcggcaaagaaactggatgtgaaggtatctctcccgcggcaatttgcccgaggcttactgtaaagtggacacatataattcatagaccaatctttctaactgcatgattgtaaacctgcggtgtccctgttccgagtctcagtacagactgtagtaccgcacatccatagtccaagactgagaaagcgggaagattctcgacgatcatttccatattggaattcccctatcatctttcacgaagacttcttctcaattttctatgagagggccctcgtccgacccttatccagcccaggtgacttgttgtatacgaatctggggcgaatggtgtacttgttatcaaccacgactcccgtgcgtcccgccctgtccagttacaagccaatgattgatcaacgtgcaatgccaagcaccgggccaagactcgggagccggtgttacaatgcatttggagatgaattggtactagattggcattgtttatgaggggctgttggcttgccctagcagataaagcaggaatataaaatcgacgcttccaacttccaacttgctgatgctctctgtattcatcctacattcttgattgtaggcttgattactcaacgcattccaaaaaaaaaccacaatgggaatctctcgcactgcctgggttctggtcttcgccttccagcctttccttggcggagcgttgcctgccccctcaccacctgggatcccgtctacctctactgcaacgagtgagctggcaggattgaccgttgctgcacagggatcacaggatggatatagccgtgatgaatttccgcactggattactatcagcgggtgagtagatggagtcactgtgaacctgaagtgttggctgctcaaattgttggcgacagaaattgcgacacacgcgagacaatcctcaaacgggacggaaccaacgtggtccaaagctctagctgcagtgctaccagtggatcctggttctctccgtatgatggcgcaacctggacagctgcaagtgatgtcgacattgatcacctcgtcccgttgtcaaatgcatggaaggtgagctcggaccatctgacaacattgaccttgagatattaatgaatattcgcagtctggcgcgtccagctggaccaaagcagatcgtcaagcctttgccaatgacctcacgaatccccagctcctagcagtcactgacaacgtgaactccgcaaagggcgacaaaggcccggaatcgtggaagcctcccctaggtacgtggtaaaccatgtgtattgtctagtctatggtttctgacatagaacagcttcatattactgcacttacgccaaaatgtgggtgaaggtgaaatcggtttatgatcttaccgttacttcggacgagaaggctgctcttgttgaaatgctagcgacttgttaaaaagtttgaatacgttgtagtgagaatcaacatcgaatttgcattcataggatttgacacctaattttctaaacgcgccgcaatcgtacaattcatgtcctaatggaatcataatatagaagcaggtgatctaaagcagtatcgtagaaacgactgtgctccgcggactgaaaaggggagggcactgggaccagcggcacgaatcgaggggactggaaaatggccgagttaagtgaaagaagggtttatccggtgatccaaacttgaaccggcattcaaggaaaatattgggaatattagatcataatgcaatggttgttttattgaactaagaggaagtgcgttgttcattaaaatagtctgaagtgtcaggcaccgagatagatgacacgtggtagtcacgtggcaatagagcttggccggaacaacctgggaagttacgtgttatcgggtgactttgggggggaacgatattccgagatttcgttatcggagcactccggagaaagggaccggaacattgacggtccgaatccatcgacggggtaatgacatgtacaacagcctaggacggagtactccgccgtactccgtgcttcatacagaactatgtgcatacaacataattctactattttctactatctactattcataatctcattatttgaccaagcattgccttgacaaaatatattttccttgatctatgtggaatcatcatcggtgtcctgaaggctgacacacgaacgatcatttcttcacctttactaatcatctattcgcccggggctttgagaaagctgtgggtctgaggattttcaagtggagttattttcagccaagcattttccaatgatgcttcttgtccgcacgaaccataaaccaggttttgtggcaagccctcgggggttggatatgtgggatcgagggctccgatttctcggctcacgaatccaaagtgtttcgtgttcttgacccggcccccgagcctcactctttatgctcccattattattagcattatgaccttgccgggtgagaaaaaaactaccgatgagcttcaggatgcggagaaaaataccgatgcctgtcgtcaaagccgggcattgcttttgtcggaggaagaagcccttgaaaaagcacggagcagtcctaatgacgcgctaccgattcagataatatacgccgccagtgacccagataacccccggaactggccaaaatggcgcaaatggtatatcacctgtgtggtgagcatgctcaatgttttcacgtacgtacacttatcactccttcccagtcgaggcttatctcactcgtcccatacagcacatggtgcgcagggggcatttcctccggtgctgccggaatacaaaaagagtttggggtatcggctgaggtcactactttatgtttatctctatatattcttggatacgcaatcggccccgtccttctcgccccactctccgaatactttggtcggcagccggtttacgctgtatcatggtttggtttgttcattttccagcttccgctggctatggccccaaacatcggtactgttctggcatgtcgattcattgcaggctgtgccggaggtgcgcccctgacaaacattggaggtagtatcagcgacctctgggaacggaacgagagcggagggcccatggccgtctacgggctgagtagtacgtttgggcctcctatggcgttggtgatcaccggttatattggacttaacctcggctggcggtggatattttgggttttgatggccatgacgggcggcatttgggtcttgttggtaaccacaattcccgagacacgacacaccacagtgcttaagaggaagaccaaacgcgcacgcaagcagatgaagaaagagaatcttcaatccgcagaatctaccaccgacatgcatgcgaatagcagaaaagggctttacgaactattcgctattaccctcactcgtccattccgatttcttttttcggagcccatcacgctgttttcggcaatctataatggctttctgtatggattggtatatcttttcaacgaggcgatccctctggttttcggcgctccgaaaggacacccattcaataccggccaacagggacttgccttcttgggactggcgattggaccgttgattgcattctgtttctacccactacaagaacgatactatctgcgccgggttgccgagaacggcggcaacggtgttccagaggcgaggatgtggatggcccgtgggggtgcgattctcattcccatcagtctattttggtttgggtggacaagctatcggtcggtccattgggttgtcccaatcattgcctcgtcactatttggcgccgggatttatgttgtgattctgagcattctgaactacgttgtggatagttaccagacgtactcagcttcggctcttgctggtgtcattctggcgcgcaattttgtcggcgccggattcccattgttcgccgctcagatgtatgagaaattggactatgaatgggcttcctctctcttgggattcatctccattcttcttgtgccaattccattccttttcttctacaggggaagagccattcgcctacgaagcccgtgggcgcgggagtacttcgaccagaacgaagacagcccgcattaacaactttcggggatagcctcaacttcgatttgaaaagcgtgaaaagaaaacttccttgttaggaggcatatcaaatgatgtattctcaagttcaatagcttgctagacccttaatctcctagaagttttcagttgtactgaatatgcgccgatgctcaatgcgactacaatcctcatctaggagatttatagtcgctaacacatcaagatgtaattctgccgtttctcatattgaaaccgggtgtaaaattggtttggtcccgactgatctatgcgcccttagtgatcaatgatcatctgctcatcgtccccgtgaggatgcaattacccctatctttttagtaacgttattgaagagctgcttttccctcacaactgcaaatccggatagattatagtcgtcaatttcagacgaaacacgtagtgaagtatcccgccgtagtctattagtccccggaaaacttgctacacttgtttgtagagatattaagggccgtaaccgagtcattgtaaactttacagatcaggcagtgatacttccgggtcattatgacttgggaccacaaagttgacatctggagtgttggcatgttggtaggataacaacctatgcagtcacttgcggtcaccgtgaaaactgacattagctcagatctaggatctttttgagcatcgccacatttgaagggctcgaaatcccgctgaacttgatgatgggtatcctcttgccgaaatgcagacagtcctgggaagccctcctctcaaactcctcggtcggagcgaaaggagccaccagttttgggatgaaaaaggtttgtgcggctatcccctaagaatgattcaaatcatatttgccaaatttaataattgtatcaggtaattggaaagtgcagctccattgtcagatttcaacctcgaggcgctagaagagagactcaaaggtgatgcaaaagaggaatttttacgttttcttcggcgaatgctatgttggctcccagaagaaagagcgtccgctaagctgctttttgatctttggttaatgcgtggcctctgtaaatgagaccatggataggtcacttctgatgatatgcattcatttatccatttactaatggtacagagggattcagtaattcattattgtcaacataaggaaaaagccaactcattctcggcaataatggcaatacttggccaatcgggggctctacagccttaggaatcagttcctcatagtcgtgactgtcacaatccactacagatcgctatcatctacttcaagtttgtttgtttgcttacttgctcgtttgcttgcttacttattgtttgcattgtttaccagtttctatgatatagattgtttgctagatagctaagcgagatattagaggtgtacaatgtttgcaaagggacagctatatcaacaggctgcctcccacctcctaccttgcaacttgcttcttttttctccccccatcttagttattatatattgaacgcaatcttctatcttcgaaaaacctggcacgtcatattggtaatctagcaaataaaattcattctaaccccctttagaaaaatcctcttagaacctataactatgctaactaaggctgatagcgacgaatggcatcaagcgcgagtgcagtagaaatacctcggttcccagccacagtctcttagaataatactgatacagagttcccatctcccatccaccatccaccatccaccatccatcatctggctcttgtatcgatagtaagactttcagccctgaaatatgacgaaccccaacttggtggcaaacaatcagtcgcatggcgagacttaccgcatccactggcccgaatctgggatcccgctctctcgatggattttttttcggagtggagtggccatttttcctcgattgttgttttgatgccaaaagtgcaagtaagcatattgcatacctgggcacatcactacagtggtccggaggggctagtctacggtattgtagttcaggggtaagaatttatttctttgtaccagaggggataataactgcaccctcatatcacaacaagaagaattgcagtaaaaaatgctgaagtactcgggtctctcggcaagtctaagtgttacgtgccaattcgattcagaagaaaagagtgcaattcaaaccagaatctaagtacaaagaaggaaaggaaaagagaaactatctgtgtgcgtgttcttcccctttgacgtccttccgtttgcattcgatgcaaaactcgcaattgtctcgcttaatctcgtttgtcattctaggaaggtgcgaggccgagggcgtggtcgttcctgcctgtttggtaggtacgatccttcctagatcgtcatactaagcccctaagcagtggatgagctaactagttagttaactaggttagttaatgatatgtaatgggtgactaagccagttacagggttggcagttctttacactatacggagtagtatcggttgaattctccaatggtgactagatcgactaagaccataagaacgtggatcctgcgaaggacttggcggcatgcgagtgtcaaatcaatcatagtttcggatcagattagttggccaagccaacggaaatcttctccttccacgcgaatcttggccgaaagagatttttttatccttctgtttcctgatcatccccctttctccgccttttctcttgaattaagaaaattgtaatcaagttgcttcgtattgtacgaaggagtattgttatgttcactcaaactgccaaggaccaggaacaattcaccaacgatcccctggacgggcagacgccaagatgccaagactaaagaggtatggctcggaatcttacgtgtgaccgaacactgattcctattgactataattggtacggagtattatggacgaatcttacaagctgagagtgtaaagttcttcagtcttctctttatcagattccatctaatctgataaagctgatggcatccaataagtaagtctggaatactattgccactgggacatatggcagaactttcgaacgaattaggaaaaagcagaagaccctgccagacttctatagtggtgtcttcagtctattccccaccgcaatgaggctatgcagaaaaattcccccacatgtctttgattatcaacggatctgataggggaaactagctttgtcttacccgaacagtgatttagatctgtcgatctgtactatgcaggactttcaggcttttcttggcctctcttggctcattttgcgcgatttccatgagaatatgagcgcagtagataagttcctcccatcttggtataagaagattcgtatccttttctgagcataaccctcttcagtcaagaaccaagggttcaatataccactatgagccccttcttcctggtagtcagcctgtggcaagccacgttggtaacagcaagcgctctatgtgcgactggctgtcagactgcggtttccagcaacgaattttcaggcatcagcatccttgaggactattattcagctttgtgccaaaactccctccaagtgaaggcaacattcatttgtatgcgagactactgcccagaagacgaaattgcaaaaggatggaatgatctcaatcaggtgtgtgaacaagatggaggagttgagcttcttccatggtctatcattgacgatgtgacggacgcggagacaaaatcttggcctatcttgacctatgaggatatccaacttggctctacctttaacacctcagtttccgtggatcagagcctcttccaacttgcgtatcagacaactgtgagttatactatatcactggatctgattgatgattaactggtgtctagttcgactgggatgatcaaactacgcggcgaacgaactacgggtaactcatagatccacccactcccttggttttcacaattacttacgcacataccttcctcatagatatgctacaattggattctggggattgatagtactttttggtgcccttgacaatcttttccgatatttaaacaatttgtctgtgctgcgctcgagaacaatgacaagattcgaaagctccgttcgccgactggtagtcgtgccaccgatcttgaagaaaagtccattcacgcgcttttgcggtattccttctacatcaagactacaagccatgactatctcggccttcttcgtgatcaacataatcctcatgtgtgtggaataccgtgctttcgaaaataatctttagtgagaccagattttatcctcctcctgattggccaaccggataatgagttgactgacctcccttcccatagcttcacccgaaagtcctcacagctttggcgttatatagcagatagggcggcggtcatggcgatcagcaatttaccagtcatgtggctcttttccacaagaaacaattgtcttttgtgggcaacatcctgggaatttgggacctttaatacctttcaccgttggattggaagagcttgtgctatagaggtatttgtccatgggatgggggtttgtatctatcaatatcaaggtgtgtctattcgcattcttttcgctggaggcctttgagaaaatattcccgagttggattgaagttgacaaagtttgagaatgaagaggttggaaaggagtttttcttacctctctggaaagagcgtgacttctatatgggagttgttgtaagtcaaaaattccgtgtattctctgccttagctaatacgctctcacaggcagctctctcgattatcgtgacgtgccttttagcaagctcgggaatccgaagggcagcctatgaattatttttgatagttcaccaggcttttgctgttcttattcttgctgcgttgtggtagtgagttcctttcagcatcaacttttaggaacatgcttgactaacggaatttccagccatctaactgtcgatggcccagatcatgtcccatacctttggccttgtattgctgtttggtcatttgatagactgggaagggtgtttcgtctattgatctggaacaagccaacttcacactcctctggagaatacaacagtgacgcagatctcattcaggtaaaggcccgcatacgacgagttgttgctcctcaacctggaagttacttctatgtgtatgggtggcggtctctttatttttgggaaagtcacccatttacacttagcgggtggactacggtcaatacggaagaagaatcttacacagaactcgtatttcttattggagtccacggaggcttcacatccaggcttcgcaaacagctgcttcgtcaagatgagtccgggatcgactcttcatcctctgtgagaaaggttcacctggctgttgaaggtccttatggtccacatttcgatccgtggaattctgaaatggccgtttttgtcattggtggcgcgggtatcacgatcgcaacgtctttcatccaacagctggtagatttcgtgcggcttggcaagcacgtggatcaaaagatcaagtgcttgaagataatatgggccataaagaacatcgagctttatcggttcgtctatgagcgctatatatcaacgtgggaagctgtcttcgcatcaacatatattgaaatctcactggacgtgtacctgacaagcccttccaaggcggatcaacaagttgaattgccgatcccagaatctcaaaccggacacagtgcgacaaaaaagaaaatacgagcagttgtatcgccggtgtgttcaatgaactttcatgcctcggaggaaaaagtggcttctgaagaggtacataaccagtcagcgtttgggcctctaaaaacaaatctcattcacggaaggccaatcatccgcgatgtgattagaagccaagttgaaagcttcaattcttacccggagcaacagattgcactgatcggctgtggaccggatacaatggcacacgacatacgcctttcctttgcagaatcctcaaaagagactgacgtcaacattatctttcacctggcccctttcggctggtgattgatgttcttgtttatccttgaacctggaataaatattcaatgattcactgtactcatgtatttatgtcacattttcaccgcatcgatatgaagttgaaatgctatcctcgtgattatcaaggaatgtgtcttctccgagatactgtagtacttagggccatcttcattcttgtatagcactattagtgggaaggggcttagtggaatggaatttctggaatttttgcaaagggagctatatcaacaggctgccttctagtttgcaacttgcttcttcatcctctccctatcttagtagttattttatatttgaaagaactgtcacgtcacattaataatgtagcaaataaaattgatactaaccccttcagataaattctcttagaacctatgtgctaaccaaggctgacagcgacgaatggcatcaagcgcgagtgcagtagaagtacctcggtttcctagccatagcctcttagaataatactgatatagagttcctatctcccatccaccatctggttcttgcatcgatagtaggaatttaagccctgaaacatgacgaactccaacttggtggcaaacaatcagtcgcatggcgagacttgccgcatccactggtacactaagacgttcctccagccgcttaataagcaatcctcgcattcgaatatagacacaaggccgatgattcttaaggcgtaacatcatgcgcgataggaagaagaagaatgcctcaaggagtggatagaaggcggatccgtggatgtaagtccgtgtttggaggacttggtaaacccaatcaaaggtctcagagagctcattaccccggccatactggtagaaaatattcaaaatattgcaacacacgattgggtccacacgcttcttgaagtcagtgaagaaggtctggcggcccgcgggtggaagatgtcagtttttcaaagagctcacagttttctccactggtgaagctcatacctgcatcagaccatcagctgttcgatactgaagcatcttgtccatcacaagattggcaacgtgagtgggccgattcaaaattgtaataccgagtgatgtcgtgtccatatcatcggggaagtcagcttgggtaagaacaggtgtaactactctggtcagtctgtgttaacagatatgcagacgggcaatgatcactttcataccgataaaaaggttccatgtggtccgatggcttccaatatcaatcaagcttctgttctggatcagctaattgaataaattattttccgggctttgacaaacctgtcgccagtgagctcaagtatgagcagttgcgtgaagttttccttcactggtacgccggtatgggtgaaggaatggtgtttttgagcattctcatggagatatcgcgtacctcgcccaatagggtcaatgtcgacaaaattcaaaatgctgcggtacagcgaataatctgatggcataacgccctgcatccccatagacattgcagcaagtaagttactcgtgtcatcatctaccaagatgacctgctccgagctcaatcctatctgatttaggacatgttgataaaatcgcaattcaggcttctgcatgccgatatcacttgacacaaaaacacgttcgaacaaagaccaatcaaacccaagaaactttaccaaggcgtagtcctctttggaaaaatttgtaaccgcatatagctcgaagagacctttagacttggccttcattgaagccaatgcctccacgactttggggttcacacatagtgattttcgtacagcaaggatagctttctttatctcctcttgaggatggcgaaagtcggacgccagtcgcgcaaagtattgctcttcggtgatgcgaccacattggtattccactgttgctccacagtatagaatagacttgagagtatttgtgggaagttctatgttctgcattgaggaatgcaagacaatatttttcaactcaatcagaacccctttgtagggaatgcgcttgatgattttacccatgatgatatttccgggttgaggtggcatatggagaccttattgtcgagcactactaaatagtcgagtcgtgtaagcggtcaagtagccttgttgctacgagtcgctgagcgtcagcccgaccttgatggactgccaccacgtctgttgagaaaataccgtcagttgagccgaggccagtgtatgtatcgtaccaatgggaatttcatccctttttataagcggaaatttgtgctaattatattgaattcaatagtagcagcagagagtcattctcgataactctgggtcgtgacttgatccgtattgtggacggcaggttctggcgcactacagacagcgaaccaatattgcaggatctcaacctccaaatcaagtgcgagacactaacagcagtggttggaccttctggatgcggtaagacgactctctttgaggccctattgagagagcttccatgtccacttgactctatccaagttaactccgcatttgacctacgaaccggtgtcgcatactgttcacaacaaccgtggctcagaaacgacactgttcggaataacatcatcgccggcatgccgtacaatgaagcctggtacaacaccgtaattcatgcttgtgcattggaggaaatcatccagaagctgagcgaaggaatggtcggcagtggaggcaggagcctgagtggagggcagaagcagagaattgttagcatacctcaatgctgcattgagagtcacagctaacattccgctagtcgttggcgcgcgccatatactcgcgtcgcccacttcttctgcttgatgactccctttcgggaattgataatctctccatacagcatattttcgatcgtttgctgggtgctgatggcttgataaagcagacgggtataacagccatccttgcaacacaaaatggtaagaacttagaataaccgacgcaaatatgcgagaataacaagaatacattagtgaaaaactcaagtctctttgaccagatcatcactctcggtggtgataccactgtgctcgaacgaaaatcccatgccgacgctatgaagaattcagagaagccaatcggtccagggaagcttcctattgaggcgcccatttccatatcccagaatccattcgcgttcgccctggaagccaggtttgagaccgcggcttctgaccctcgcgacccccggaaaggtgaactgggggaatacaaataccactttgcctccttgggcttcaggaaattgggcctcgccgtctttctggtcgtatcttatgtattcttctcctcgttcccccgtgagtcatcacctgtcgatattcgatgattatcactcatctcattcgcttgcagaaatttggcttgaatggtggactgcttctaatgtagaccaccctaataacaggttgggctattggattggggtatacgctgtttttggatttctggctgtcttctccctgattactgcttcatggtttgtctcaatcatcacaaactcgctccttagtctgacattaaacaggctcatgctttgcaacatggtgaagaactcagcgaagtctctgcatttggaactggtccagattgttgagcggtgggtatccttttcggaagctgttagtgaacagatttgctaacatcttcacagggccgtcgcatctgtgttcacttgtacagatccaggaatcacagtgaaccggttcgtctttcaaccgataagctgaatatcaacagctttttctgaccatttgaacagatttagtcaggatatggctttaatcgatatggaattgcctatggccttcgccaacaccattatctgtcagtttgtgtcttccaaatacctgcccacgcgacttactaatatttctagccttcacaacctgcgtggcacaactcgttatcattgctgtgtcttcacgttatcttggtgccgccatccctttcatcctcggcgtttgtatcctcactgaacggctatccattcgaaagtcacgacaattacggttctttgatatcgaagccaagagtccgttgtacacggagttcattgaactgctgaacggcctccatgtggttcgcgccttcgatatgcagaaggaatttgagcaacgacttgccacagcactcgatgcatcacagaagccgttttatctcctcctctgtgcgcagcaatggctgggtttggtactaaatttggtgaatctcggtctagcgttgatcttagttggtgtcacaacagccactcgtggcctctcgggtggctttttaggtgttgcgctgatcaatctgaaaagctttggaccaagcttatccgaattggttgatgtgtggtgtacattgcagaatagtctcgccgcagttgagcgtgtgaaacctttctccgaggaaaccccgaaagagtccacagactagcctgttagcccgtcgctaggctggccccagctaggggccattcaaatgcagtaagtatgtctgggatacgagtcagtggataatattggctcgaaatacttagtcgcagctaatatctaacttgaaaacagctctggttcactcgccgtcaaatccctgtcacttgctatcccggcaggaaataagattgtcatatgtggccgaagtggcaggtaagcagcttccgcgggaatgtcaaaacaatttgaactaacatcagggtttcacaaagcggaaaatcaacgttgtgcatggctctcttccgcatgcttgatccgatatccggcaccatctcgatcgatagacaagatataactcgagtcccctacaaacttcttcgctcggcactttctattgtccctcaggatgcagtgatcctaggaggatcaatctgactcaatgttgaccttgaaaatcagcattccgacagagaagtcatcgaagcattagaacaagccgaactatgggagtccgttaaagagcgattcaggagagaagacgatacaagcgccgaatctctttccgggggccagaagaagcaactctgccttgcgcgcgcgttagtcaaaaacagtaaaatcttagttttagataaggcaacagccaggttcgccttgaacagtcagttcgctccaattttgaattcaactaacctgccacggtagtgccgactctgcgaccgatcaaagggtccatgggcttgttaatcgaggtctacctggaacgacggttgtttctgttatacatcggttgaagcatgttggtttgtatgatctcgtcgctgtctttgatgacggtgagctggtggagatgggtaacctggtagaactgctcgaggactcagcttcgaggctagtggagctgtttgtacgtgattgactcgatatatagccttgcgatagtatcataaatagtgcagtgggggtttccagagcaggatgactaagcggctatatgacataaaagcactcccgaggcctagatagtaacgtagatacctttctacctctcttctcagtagtcaccctatggtattctcctctctagtaccctactactcctagtaacgactctactcttatacctatttcgcaggtagggctgtcggtaccccttaggggtcccctctttatatagtgaccgatgtagggagtagcgttaactagtatattagggagggggtaactactaaatctaccttaccagccttttaccactccttttaccagttacctggctgaatgaacgttatccttaaagcgatatcctaataagtttctactaccttctataatcagccgccttagtaataaccataccctacgtttcagtcttcagtaacgtggcccaaccttgggctgagaagtcaggcccgaagcccgacccagcgacgggtcgnnnnnnnnnnnnnnnnnnnnnnnnnnnnnnnnnnnnnnnnnnnnnnnnnnnnnnnnnnnnnnnnnnnnnnnnnnnnnnnnnnnnnnnnnnnnnnnnnnnnnnnnnnnnnnnnnnnnnnnnnnnnnnnnnnnnnnnnnnnnnnnnnnnnnnnnnnnnnnnnnnnnnnnnnnnnnnnnnnnnnnnnnnnnnnnnnnnnnnnnnnnnnnnnnnnnnnnnnnnnnnnnnnnnnnnnnnnnnnnnnnnnnnncccccggggggggggggggggtcgggtcaaaacgggctttgatctacttggacctccctaaaaggtcgaataagaattaagcgagataaatgtaagaggataagaagggaagaacatatacttagatagtttctctttttccttttcttctttatacttagaatttggttggaattgtactcttttcttctgaatcgaattggcttgtaacatgaaatgctttatgagaatgccaggaaaccacctaaaaaagtcgggatcattgaatttgtatggtgccaaatgcttcatgctcatgggtaaggctggcagattactaagctctctgtaatggtaattcaggtgtccttacttttctgccaggcaaaattcagccattaaggccctaatatggtgaaaacgaccctgcgcgctatgccccttcgtacccgttgtcatagctgggatagaaacaacactcgattctcggaagaggatggcttgttccttctgtggacaacgggaagcgagatatggagaattgttttaagtacaatgaattcaatcatccattttttcgccagccaagcagtttcctgcgacaggccacggttctcagtatcacaaggcgaggttttttagccagccagtctccaggacctcggatttcattcccacctgctctcagtttgaatccacttcgatgcccaatgtcaacaaaattggattcgacgaagccgcccatttttgactatcttcccaaaatctggatgcctcttccaagctcttggcaaaaaggcttcaacaatatggtcgggtccttccaggtccagtaatccacatatctcagctcgacatgttcgaaaatcgtcacctgaataaagttagcttataccattctactgcgcatctagaacataatggtccatagaatttagatcagtggcataattaccattctatgcatagtggcatcgatgacaagcataatgttggcattccactgggcttcgattggcaccaacaagaactatgcctgcacaaaattccctgaggccataattcctgccgtggcagtcacagcattcccagcccatgcggattagatcctggacaaagcaatacgcttcaccacatggagaatccactgcaacatctgtgacagttctctcctgcccacacattgtctgtctccctgttctttggttgactctagcataacgacaatatgttatacctcgttggagaattcgatgtccacaacgatagactcgatactggcgaccacacattgtttttaataaaagccaaagaaaaatacgtgcagaatgcttttgtcgaccgaaacgatgtgaattggataaagaatattttgaatatgtcttcgttgagtattttaatcaagaagaggatcttggaagcttccttattgcttatatgtccaaatgcctatagtattgtcctatttttggcttgataatgcgacactgaggggctacatggcggttgccgcttcgaacctttggcgcttaggtctgaaactatcttagtcaattccactaattacatcatgtcaggttgttcgttatagaatatggtagcgttttacatcatgcgaatcatgacactctatgttcgaagtaattataggtttttagtgacgttacattaaccgccaactttgtagtctaataaatgaaaaagcactaagtaccgggcctcacttttcagaagctaggagaaagcagagggaggtcctcgatttcttgtatacagtaaaatatacataaaagagagaaaaatcatattcgacgaacgaggatactaaaactagatataattatatctcgagatctgactatactcggtctagaaaatgcgctcacctttaggtcatctagcttattgccgcccactactctccctcccctccaactttgccctgtgacagcgcttagtcgaaaatactttcacccgttaggtaatccaacttattgacccctcttctcctccatatgtggatgaaaatctctcacatccatgtctagatagtgagtagatgtcacattgcaggactcctagagtactgcatatttcttagtaaagagcttaatcaagactaaggaaaaagggaaacaagggaaaaaagaagtcgaaaagtcagggaaactggaattaggcagaggtagacaacgtacacagaatcaagatgcaaacatagtgaatgcatacaggaccaagcattgcaaccaatcacagattaatgtataaagagagtaaaggaaattgctgccttagcctatcagagggtgtaacagcggacagtagaaagtataagcccagaacgatagtcatctagtattcattcaaaaaggtaccgcttaatattttcaagtccctgcagatctccctcggtcgagttagacttctccttctcaacccaaccttcagtatagcctcctccaaaatcaatcaggtatgcatcctcattgacatcaatgagcacattggctgccttcgcatctccccaaatgatattatgtgaatgaaagtgttcaagtgtctgcgaaatttgatcaacccatttttgtcggagctcggaaaacttgggattatgtccatcaatgcaattgagtgtagctctatcacaattaatgtatgatagagccaatcccaatatatacccatcattatcttggaccagcccttctagttgtgatataagaatcgggggatcgaatttagccatgcgaatctttgaataagtgagaatctctcttgcggtaatacccatgtcacccccatagactatcttgaagaagctaggccgtggttgcccatgaataaataccttatgaggtattcctggcagtgcagctgaatctgtactaattggaacctggacttcccttgggtggtagacagaaaaagccgagtagtcgacagaagatggtaaagaggccccgataagatgatttctcatgttcttagtgttgctgagataaacgggaactaatttgtctccaactacctgtacagtatagtgcaattcttctgcaaacagacaatcctcgagagtgtacttttggttcgggtccaggggagcaatttcgtgaaagattggcagaaatggttgcaagatccaatcatgcatttcatcaagggggtcttcaaattccccctccacatctatctcagactcatcaggaatccattctggttcttgatgttgaacgtgtcgaagatattcggctaggagggcaggcgagctttcgaagctggaagtaaaaagatcgatcttgaagcgtttgttggagacataaacattcaactgcgtgtctgtgtttctggtgcttgatctaaatggaccgatatcatagatgggttgtttccgtgccatcgttggccatcgaggagttgcggcaagggaaaaaaaaataaaaaataaaaactaaaaagtaaaaagtaaaaagaaggtaggagtaagaaactgtcaggtcgggggaagtgaggtgtacacggcacaaagtcatgtgactgtcgaccaataggtaagtccggcaaataaataaccatcttcaccgccatcaccctctgcaatacttgattggaaaagctacaggaaaggggttgagcctggagaaccgacaggacggtatgattttcggcctcggacgccatgtgagtagaaaacgaataaattgaaacaatgcttttctactgcaagtttgtagtaacgtatttttgatcactttagcgcccttttcaactcgaggatgatgaatgccaatcattagtcgttgttgatatatacccaggtgaaacgcctacggcggaagcccattgtgcaatagtcgccacagtctagattggtgcttgaattagatttcgagacatctagatgctgatgcaagtggccgaaattatctgggcgcttagctaaaaattatacgacggcaactgacatcgcgttgtcccctatccctactttcagggacaaaatcccaacaagtgcatttcacggtggcaaaggaaaggaagaccattagaggtttcatgttgtgcgtctcgccgtgtaatgcaacctgcgccgcacggaagtttcacctgcatggcatatccacgccaatcaaggttagcaatgcaatataacgtcattctcggcgtcaatcttttttaggtgtctgcttttggactccaaccctcttgggtaatagaagctcgtattccatgcgcatgtcaatgttaactgacgacttaagcatatgtgatgaaagaaccaaatagcagccagtgagaattcaatatctgggaagaaggcttggtgcaattcaagtatacagcatgtttagtcatcttccttgaaccatccatcagcccagtgtgaggtctcaatcataggaggggcgtcattgcgttattcggtggtcccgaggctctgtgcacgaggcaaactgaactgccttagttgatctggctatcagggctgggccaaagatcctcgatagccgtacgccctttggaggtctaggaataattgtactgcaagtttctctgaaaaggtctaattggctgaaggccaagaccaaccacaatgcacagctccatgtatgcatggcatgtatgtatggaggggtaaagcactcgctcaatcagacgatactgttggctcatgccgaggttggccaatggggctgtgtgtggtgtctgcattgccctcttttgggcaaccgccctgccagaccatgattatgcatttgcgcacagtcttgggtttacttcctaatatagttatggccagttttgtgctatttccaaatttggtaactaatcaactttcgagaaacttcctattttgtattccagggcgaccaagaaacaaacgtcgttccttctcactgcctatctattaaattatataccgccccctattattactatacgttacgaaacccacttcttccttcttcaacccctcaaccatggttcaacagatagagcttgcctgcgatcaacgcctacattatcgtatccttcgagataaaggctatacgtatccctctattatatcccgtttaaattgcagtatacagtaaactcaatatacgtattataatcaaaccatactgtagaagaagaagataggccgacttccaaagcttacccctgagtgccttaacgaagtaatcctatagatttagcaatctctgaagtatcgctatctaaattatcataatatctatggtattttagatcttagtatatctagggaaacacttcgcctatcttgtaacggataaaggtccgtacaagagggaaacacatgcaaacctgcacaggctcgggaaggaacatctatgtcatcacacatctgtttcgatatcgatccgtgaggggtccgtgtgagacccctaggtatggaatatctaagggaatgctgtatgtaatggaggatcgggaaacagagacagtagtatacgcagtggtatattggaactaatagctgcttctctagggaagcagtatgcgaggacaatatataggtttgtgggtcacatgattcatagaggctgtgtaagcaacacgcgttgctcctatccagtccacagtccccccacgcaccatgacaggtaccatacttcaggcatcagccttcttagtactggggccctgacactacaccgtattaaaacaattgaatacagtgattaataataaattactggcagaataacagtggagaacgacgtttgtttcttggtcgtacactgtgcctgcatgcatgagacttcgtctcatagtccccaacgtggctttcccccgcaccagccaattgtctcttcggcacgggaatccacagtaagatagcgaccgttacaaactcagctttagatccatcttattctgctatttccaggaggctcgaggcataaactaccacctgtcagttagcattgtaaatatctgaatcacggaggagtagctacatatttggaataaccaaaaacatactaactcaacggggtcggagaatatcttcctgtctttcttcccaggaatattttaaggtactctcttggttccgccataaccgttgcatttggtgcatatagatgtaccaaccattcccacatcattgcattcagtgcaaggcatgttttcttttccgacgtgttgattcaaaagcagaggggaaagtggcgatattcttgtacggggaagggcaaaacaggggatgttgtagttatcgtagaaaagtcaaggttaaagaaagaaagaggatatttatagccctttagttccgatacccaaactcgttgggtggcaaaccccgacagtggccagagctcccaatgaccctcccaactaggcttgtacacatttcggctctccacatacccaacgcgatgccgaatcctcgttttgttgcagtcgatccaagccagagaaagaagcgaagggtgaaaacaccgcaatgccagacttgtttcaattcattcggaacataacaagaattccgcgaccatatcgcagactatcaggccagtaaagtcgtgactctccaatttatccgctgacttgccagtttagttggaattccagctctttgttcttcgcccttgtcattttcaatgtgatccaccccaagcaagattcttgttggaccggacgccaactggccgaaaatcagcaaagaggaaaagtaggccaccaaacaagcgaaggaggcgaagcaattggccaaggcaggtggcttgacatctcctacggtctagtttgacaccttattttcatcctcaagcgttggagtggatttttttatgaatatgacgatctatataaaaaacatacaataaatcgtccgtactacactgggtactcgtactgatcacctcctacatggttaaaatatttaaataagctgctgctcaggtgtaagaagttacttcataaccattcgcgaatgctttcgaggctaactggtttccccggttgtttacttccaaccccaagaatctcgggagatttgcgggatcggcgatcgtgcacggacataaggtggcaccaccaaggtagacacaccgtcggagagaagttggaggccccccactggtcctcatatcacttcgccatgtctctcgagctgtaccacactgcacacaacgccggccagaccaccgtcgtactaatccatggcgccttggtatctggtctctactgggatcttgtgatcccccacctcacgtcttatcgcctcctggtcccagatcttccaggccatggcaattccgccagcgcgccattttcagtggatctcgcagcgcgtcagattgcccagctgatccgtatacacgcgaatggttcagcgcacattgttggccacagtctgggtgctcaggtcgctatccgcctggcctgtaccgaaccagatgtggtgaactctgtcttcatctctggttttggaatgttccctcaaatatcacttacgccgtatattccctacgcagtgtgggtgatgctgcgtgtggagaactgccttagccggtctcttatcagctgggcaatggatggtgccgatatcccacgtattgataccaatctcggtacacttgacctatgtcgccagattgtatcaccggagcatcctacacagtggccatcaccatggcctgcgcgcactctgattgttgcagcggggaaaggggggttagtgcctacaaaggatagcccgggtgatgctgtgaagttgatggcgatcgggagagagctgaacgaagagactatcgcgtatacacatttgaaaatgcgacatccgtggaatcgtcaggatccgcggctatttgcagagactgccgcggcgtggtttgaacataaggagcttcccgagggctttgtcaagctttagcgtcgggtagatgactgtttgaaaatagaagtttgtcccaggacttggatcccataaactccatattaaggaacatcaagataaaatagaactttggatgacaattgtcgtgcctggggggtggtaccacctaagcagcggctgatttggtcaagcgggggcgtctgacaccctttcatgaatgcctaaacatcaacttcaggagttaaaggtgttgaaagattgattcaagggctcgaataatcttcgctgagcgccttttgggagtcaatttcccacgatgcgtgcagatattggccattacgccagagatgtcgtcaattctatcccatccttccacggccagagtgctgttggtgatttgcaactattattcggtaatgatatcttaactatagcgctgtcgagctttggaatagtcggcttctcagtctggtcgatacggagaccgtggcaacgtccgatcaagaaggtcgcgctccaaggacgtgtagtctttgcgaaatcggtatttccgtctatataggaaatcatagagcctaagtacatataaaat
